(19) United States
(12) Patent Application Publication
(10) Pub. No.: US 2026/0218198 A1
(43) Pub. Date: Jul. 30, 2026

(54) NOVEL FAS RNAi THERAPEUTICS AND USES THEREOF

(71) Applicant: ELI LILLY AND COMPANY, Indianapolis, IN (US)

(72) Inventors: Patrick Joseph ANTONELLIS, Norwell, MA (US); Seth Andrew BAWEL, Brownsburg, IN (US); Matthew Joseph HAMANG, Indianapolis, IN (US); Theodore Curtis JESSOP, Zionsville, IN (US); Gregory Lawrence LACKNER, Indianapolis, IN (US); Jibo WANG, Carmel, IN (US); Takako WILSON, San Diego, CA (US)

(21) Appl. No.: 19/141,294

(22) PCT Filed: Dec. 20, 2023
(86) PCT No.: PCT/US23/84990

§ 371 Date: Jun. 19, 2025

Related U.S. Application Data
(60) Provisional application No. 63/476,483, filed on Dec. 21, 2022.

(51) Int. Cl. C12N 15/113; A61P 1/16

(52) U.S. Cl. CPC C12N 15/1138; A61P 1/16; C12N 2310/14; C12N 2310/315; C12N 2310/321; C12N 2310/322; C12N 2310/351

(57) ABSTRACT

The present invention relates to novel therapeutic compounds, known as RNAi agents, that decrease expression of the FAS receptor (expressed by the FAS gene), thereby decreasing expression of FAS mRNA and protein expression. Such RNAi agents are useful in the treatment of diseases involving the regulation of FAS expression and function, such as autoimmune hepatitis.

### BACKGROUND

[0001] The present invention relates to novel therapeutic compounds, known as RNAi agents, that decrease expression of the FAS (expressed by the FAS gene), thereby decreasing expression of FAS mRNA and FAS protein. Such RNAi agents are useful in the treatment of diseases involving the regulation of FAS expression and function, such as autoimmune hepatitis.

[0002] FAS, the Fas cell death receptor, and its ligand, FASL, are members of the TNFR superfamily. Binding of FASL to FAS results in downstream death-inducing signaling involving caspases (e.g., caspase 8 and 10) and Fas-associated death domain protein (FADD), which form a complex. Caspase autoproteolysis in the complex results in caspase cascade, and leads to apoptosis. NF-kappaB, MAPK3/ERK1, and MAPK8/JNK are also known to be activated by FAS signaling, and such activation is thought to result in proliferation in normal diploid fibroblast and T cells. These play an important role in regulation of the immune response involving cells that express FAS, which includes hepatocytes.

[0003] Autoimmune hepatitis (AIH) is a chronic inflammation of the liver with no identifiable cause such as a viral infection. AIH patients have increased FAS levels in hepatocytes. Genetics, the environment (such as an environmental trigger), and native immune system dysregulation are thought to play a part in the progression of the disease from inflammation to liver fibrosis. AIH often first presents as patients reach their teen years.

[0004] Treatment options are limited and include high dose steroid treatment, often in combination with azathioprine, another immunosuppressive agent. Treatment is correlated with a downregulation of FAS and patients can achieve near remission of inflammation biochemically. However, steroid treatment, especially when taken long term and/or in high doses, can cause a wide range of serious side effects, as can other immunosuppressive agent treatment such azathioprine. Serious side effects can include onset of diabetes, thinning bones (osteoporosis), broken bones (osteonecrosis), high blood pressure, cataracts, glaucoma, and weight gain. If treatment is removed, patients often experience recurrence, and some patients experience disease progression that requires a liver transplant. Accordingly, there is a need for improved treatments for AIH.

### SUMMARY OF INVENTION

[0005] In one aspect, provided herein are RNAi agents for reducing FAS gene expression, wherein the RNAi agent comprises a delivery moiety of Formula I conjugated to R, wherein R is a double stranded RNA (dsRNA) comprising an antisense strand and a sense strand:

[chemical structure]

wherein R is conjugated to connection point E of Formula I, optionally via a linker, wherein the sense strand and the antisense strand form a duplex region, and wherein the antisense strand comprises a region of complementarity to a FAS mRNA target sequence of SEQ ID NO: 1, and wherein the sense and antisense strand each optionally comprise one or more modified nucleotides and one or more modified internucleotide linkages. In some embodiments, Formula I is conjugated to the sense strand, optionally via a linker. In some embodiments, Formula I is conjugated to the 3′ terminal nucleotide of the sense strand, optionally via a linker.

[0006] In some embodiments, the antisense strand is 15 to 50 nucleotides in length. In some embodiments, the sense strand is 15 to 50 nucleotides in length. In some embodiments, the antisense strand is between 18 and 23 nucleotides in length. In some embodiments, the sense strand is between 18 and 21 nucleotides in length. In some embodiments, the antisense strand is 23 nucleotides in length and the sense strand is 21 nucleotides in length.

[0007] In some embodiments, the sense strand or the antisense strand comprises a sequence selected from Table 2, 3A, 3B, 4A, 4B, 7, or 8 disclosed herein. In some embodiments, the sense strand and the antisense strand comprises a sequence selected from Table 2, 3A, 3B, 4A, 4B, 7, or 8 disclosed herein.

[0008] In some embodiments, R is conjugated to Formula I via a linker. In further embodiments, the linker comprises a linker of Formula II having connection points A and B or the linker comprises Formula III having connection points C and D, and wherein:

[chemical structure]

[0009] a. Formula I conjugated to Formula II at connection point A and Formula II is conjugated to a phosphate group at connection point B, and the phosphate group is further conjugated to R; or
[0010] b. Formula I conjugated to Formula III at connection point C and Formula III is conjugated to a phosphate group at connection point D, and the phosphate group is further conjugated to R.

[0011] In another aspect, provided herein are pharmaceutical composition comprising the FAS RNAi agent described herein and one or more pharmaceutically acceptable excipients.

[0012] In another aspect, provided herein are methods of treating autoimmune hepatitis (AIH) in a patient in need thereof, comprising administering to the patient a FAS RNAi agent or pharmaceutical composition thereof described herein.

[0013] In another aspect, provided herein are FAS RNAi agent for use in a therapy. Also provided herein are FAS RNAi agent for use in in the treatment of AIH. Also provided herein are uses of FAS RNAi agent in the manufacture of a medicament for the treatment of AIH

### DETAILED DESCRIPTION

[0014] FAS siRNAs and ASOs have been described, but none have progressed for treatment in patients, including for the treatment of AIH. Using the FAS RNAi agents herein to decrease expression of FAS can be employed to treat AIH in patients in need thereof. Such siRNAs may exhibit one or more of, e.g., as compared to other liver targeted siRNAs such as FAS siRNAs comprising a different delivery ligand, a different sequence, a differently modified sequence, or as compared to treatment with a vehicle control: improved knockdown in the liver; improved tissue exposure, improved exposure in liver hepatocytes; an improved durable response; an improved pharmacokinetic profile; fewer off target effects; and/or an improved toxicity profile. Other embodiments of the FAS RNAi agents herein may include one or more of fewer side effects as compared to steroids or other standard of care; an improved toxicity profile; an improved safety profile; improved tolerability or compliance; and/or improved liver function tests. Still other siRNAs herein may have other benefits, e.g., in combination with any of the preceding or as a stand-alone benefit, including improved and/or simplified synthesis, synthetic processes with fewer degradation products; or any combination thereof.

[0015] The RNAi agents herein comprise a sense strand and an antisense strand, wherein each is an oligonucleotide. In some embodiments, the RNAi agent described herein also comprise a delivery moiety. As used herein, “nucleotide” means an organic compound having a nucleoside (a nucleobase such as, for example, adenine, cytosine, guanine, thymine, or uracil; and a pentose sugar such as, for example, ribose or 2′-deoxyribose) and a phosphate group. A “nucleotide” can serve as a monomeric unit of nucleic acid polymers such as deoxyribonucleic acid (DNA) and ribonucleic acid (RNA).

[0016] As used herein, “oligonucleotide” means a short nucleic acid compound (e.g., less than about 100 nucleotides in length). An oligonucleotide may be single-stranded (ss) or double stranded (ds). An oligonucleotide may or may not have duplex regions. As a set of non-limiting examples, an oligonucleotide may be, but is not limited to, a small interfering RNA (siRNA), microRNA (miRNA), short hairpin RNA (shRNA), Dicer substrate interfering RNA (DsiRNA), or antisense oligonucleotide (ASO).

[0017] As used herein, “ribonucleotide” means a nucleotide having a ribose as its pentose sugar, which contains a hydroxyl group at its 2′ position. A modified ribonucleotide is a ribonucleotide having one or more modifications or substitutions of atoms other than hydrogen at the 2′ position, including modifications or substitutions in or of the nucleobase, sugar, or phosphate group.

[0018] As used herein, “modified internucleotide linkage” means an internucleotide linkage having one or more chemical modifications when compared with a reference internucleotide linkage having a phosphodiester bond. A modified internucleotide linkage can be a non-naturally occurring linkage.

[0019] As used herein, “modified nucleotide” refers to a nucleotide having one or more chemical modifications when compared with a corresponding reference nucleotide selected from: adenine ribonucleotide, guanine ribonucleotide, cytosine ribonucleotide, uracil ribonucleotide, adenine deoxyribonucleotide, guanine deoxyribonucleotide, cytosine deoxyribonucleotide, and thymidine deoxyribonucleotide. A modified nucleotide can be a non-naturally occurring nucleotide. A modified nucleotide can have, for example, one or more chemical modification in its sugar, nucleobase, and/or phosphate group. Additionally, or alternatively, a modified nucleotide can have one or more chemical moieties conjugated to a corresponding reference nucleotide.

[0020] The term “percentage sequence identity” with respect to a reference nucleic acid sequence is defined as the percentage of nucleotides, nucleosides, or nucleobases in a candidate sequence that are identical with the nucleotides, nucleosides, or nucleobases in the reference nucleic acid sequence, after optimally aligning the sequences and introducing gaps or overhangs, if necessary, to achieve the maximum percent sequence identity. Alignment for purposes of determining percent nucleic acid sequence identity can be achieved in various ways that are within the skill in the art, for instance, using publicly available computer software programs, for example, those described in Current Protocols in Molecular Biology (Ausubel et al., eds., 1987, Supp. 30, section 7.7.18, Table 7.7.1), and including BLAST, BLAST-2, ALIGN, Clustal W2.0 or Clustal X2.0 or Megalign (DNASTAR) software. In one embodiment herein, sequence identity is calculated use Clustal W2.0 or Clustal X2.0. In another embodiment, sequence identity is calculated using Clustal W2.0. In another embodiment, sequence identity is calculated using Clustal X2.0. Those skilled in the art can determine appropriate parameters for measuring alignment, including any algorithms needed to achieve maximal alignment over the full length of the sequences being compared. Percentage of “sequence identity” can be determined by comparing two optimally aligned sequences over a comparison window, where the fragment of the nucleic acid sequence in the comparison window may comprise additions or deletions (e.g., gaps or overhangs) as compared to the reference sequence (which does not comprise additions or deletions) for optimal alignment of the two sequences. The percentage can be calculated by determining the number of positions at which the identical nucleotide, nucleoside, or nucleobase occurs in both sequences to yield the number of matched positions, dividing the number of matched positions by the total number of positions in the window of comparison, and multiplying the result by 100 to yield the percentage of sequence identity. The output is the percent identity of the subject sequence with respect to the query sequence. In some embodiments, percent sequence identity is the percent of nucleotide residues that are identical between two strands using the PID3 calculation, which is the number of identical nucleotide residues divided by the total number of nucleotides of the shortest of the two sequences, multiplied by 100. See, e.g., Raghava, G., Barton, G. J. Quantification of the variation in percentage identity for protein sequence alignments. BMC Bioinformatics 7, 415 (2006).

[0021] As used herein, “phosphate analog” means a chemical moiety that mimics the electrostatic and/or steric properties of a phosphate group. In some embodiments, a phosphate analog is positioned at the 5′ terminal nucleotide of an oligonucleotide in place of a 5′-phosphate. A 5′ phosphate analog can include a phosphatase-resistant linkage. Examples of phosphate analogs include, but are not limited to, 5′ phosphonates, such as 5′ methylene phosphonate (5′-MP) and 5′-(E)-vinylphosphonate (5′-VP). An oligonucleotide can have a phosphate analog at a 4′-carbon position of the sugar (referred to as a “4′-phosphate analog”) at a 5′-terminal nucleotide. An example of a 4′-phosphate analog is oxymethylphosphonate, in which the oxygen atom of the oxymethyl group is bound to the sugar moiety (e.g., at its 4′-carbon) or analog thereof. See, e.g., Intl. Patent Application Publication No. WO 2018/045317. Other modifications have been developed for the 5′ end of oligonucleotides (see, e.g., Intl. Patent Application No. WO 2011/133871; U.S. Pat. No. 8,927,513; and Prakash et al. (2015) Nuc. Acids Res. 43:2993-3011).

[0022] As used herein, “region of complementarity” means a nucleotide sequence of a nucleic acid (e.g., a double stranded oligonucleotide) that is sufficiently complementary to an antiparallel nucleotide sequence to permit hybridization between the two sequences of nucleotides under appropriate hybridization conditions (e.g., in a phosphate buffer, in a cell, etc.). In some embodiments, an oligonucleotide herein includes a targeting sequence having a region of complementary to a mRNA target sequence.

[0023] As used herein, “duplex,” in reference to nucleic acids or oligonucleotides, such as a sense strand or an antisense strand means a structure formed through hydrogen bonds of complementary base pairing of two antiparallel sequences of nucleotides under suitable conditions to promote such a structure. A duplex may form despite not having full complementarity between the two strands, or when an abasic nucleotide is present.

[0024] RNA interference is a specialized cellular process that utilizes RISC for degrading RNA in a sequence dependent manner. As used herein, “RNAi agent” means an agent comprising either (a) a double stranded oligonucleotide having a sense strand (passenger) and antisense strand (guide), in which the antisense strand or part of the antisense strand is used by the Argonaute 2 (Ago2) endonuclease in the cleavage of a target mRNA or (b) a single stranded oligonucleotide having a single antisense strand, where that antisense strand (or part of that antisense strand) is used by the Ago2 endonuclease in the cleavage of a target mRNA. In some embodiments, the RNAi agent described herein also comprise a delivery moiety.

[0025] As used herein, “treatment” or “treating” refers to all processes wherein there may be a slowing, controlling, delaying, or stopping of the progression of the disorders or disease disclosed herein, or ameliorating disorder or disease symptoms, and need not indicate a total elimination of all disorder or disease symptoms. Treatment includes administration of an RNAi agent or pharmaceutical composition thereof for treatment of a disease or condition in a mammal including a human.

[0026] An “effective amount” refers to an amount necessary (for periods of time and for the means of administration) to achieve the desired therapeutic result. An effective amount of a RNAi agent may vary according to factors such as the disease state, age, sex, and weight of the individual, and the ability of the RNAi agent to elicit a desired response in the individual. An effective amount is also one in which any toxic or detrimental effects of the RNAi agent are outweighed by the therapeutically beneficial effects.

[0027] Provided herein are RNAi agents for reducing FAS gene expression, wherein the RNAi agent comprises a delivery moiety of Formula I conjugated to R, wherein R is a double stranded RNA (dsRNA) comprising an antisense strand and a sense strand:

[chemical structure]

wherein R is conjugated to connection point E of Formula I, optionally via a linker, wherein the sense strand and the antisense strand form a duplex region, and wherein the antisense strand comprises a region of complementarity to a FAS mRNA target sequence of SEQ ID NO: 1, and wherein the sense and antisense strand each optionally comprise one or more modified nucleotides and one or more modified internucleotide linkages.

[0028] Also provided here are RNAi agents for reducing FAS gene expression, wherein the RNAi agent comprises a delivery moiety of Formula Ia conjugated to R, wherein R comprises an antisense strand and a sense strand:

[chemical structure]

wherein R is optionally conjugated to Formula Ia via a linker, wherein the sense strand and the antisense strand form a duplex region, and wherein the antisense strand comprises a region of complementarity to a FAS mRNA target sequence of SEQ ID NO: 1, and wherein the sense and antisense strand each optionally comprise one or more modified nucleotides and one or more modified internucleotide linkages.

[0029] Disclosed herein are RNAi agents for reducing FAS gene expression, wherein the RNAi agents comprise a dsRNA comprising a sense strand and an antisense strand, wherein the sense strand and the antisense strand form a duplex region, and wherein the antisense strand comprises a region of complementarity of at least 15 nucleotides to the sequence as set forth in SEQ ID NO: 1, and wherein the sense strand and/or the antisense strand each optionally comprise one or more modified nucleotides and/or modified internucleotide linkages. In further embodiments, the antisense strand comprises at least 15 nucleotides of a sequence in Table 2. In further embodiments, the antisense strand comprises at least 18 nucleotides of a sequence in Table 2. In further embodiments, the RNAi agent reduces FAS gene expression by about 50% or greater in a cell expressing FAS, as compared to a control. In further embodiments, the RNAi agent reduces FAS gene expression by reducing the level of FAS mRNA transcript, the level of FAS protein, or both.

[0030] In further embodiments, the antisense strand is 15 to 50 nucleotides in length, and/or the sense strand is 15 to 50 nucleotides in length. In further embodiments, the sense and/or sense strand is independently 15 to 30 nucleotides in length. In further embodiments, the antisense strand is between 18 and 23 nucleotides in length. In further embodiments, the sense strand is between 18 and 21 nucleotides in length.

[0031] In further embodiments, the RNAi agent comprises an antisense strand that comprises at least 15 contiguous nucleotides of a sequence selected from the group consisting of SEQ ID NOs: 2-112. In still further embodiments, the antisense strand comprises at least 18 contiguous nucleotides of a sequence selected from the group consisting of SEQ ID NOs: 2-112.

[0032] In other further embodiments, the antisense strand comprises at least 18 contiguous nucleotides of a sequence selected from the group consisting of SEQ ID NOs: 224 to 334, 337, 338, 573, and 577.

[0033] In other further embodiments, the sense strand comprises at least 18 contiguous nucleotides of a sequence selected from the group consisting of SEQ ID NOs: 113 to 223, 335, 336, 572, and 576.

[0034] In further embodiments, the antisense strand of the RNAi agent is 23 nucleotides in length. In still further embodiments, the sense strand is 21 nucleotides in length. In another embodiment, the sense and antisense strand comprise a sequence selected from the sequences set forth in Table 3A.

[0035] The sense strand and the antisense strand of the RNAi agents disclosed herein do not require full complementarity. Accordingly, in the RNAi agents disclosed herein, the duplex region between the sense strand and the antisense strand comprises 0, 1, 2, or 3 mismatches between the sense strand and the antisense strand. In further embodiments, the duplex region between the sense strand and the antisense strand consists of 0, 1, 2, or 3 mismatches between the sense strand and the antisense strand.

[0036] In some embodiments, the RNAi agent comprises a sense strand comprising a first nucleic acid sequence, and an antisense strand comprises a second nucleic acid sequence, wherein the first nucleic acid sequence and the second nucleic acid sequence are selected from the group consisting of:
[0037] a. the first nucleic acid sequence has at least 90% sequence identity to SEQ ID NO: 129, and the second nucleic acid sequence has at least 90% sequence identity to SEQ ID NO: 240;
[0038] b. the first nucleic acid sequence has at least 90% sequence identity to SEQ ID NO: 116, and the second nucleic acid sequence has at least 90% sequence identity to SEQ ID NO: 227;
[0039] c. the first nucleic acid sequence has at least 90% sequence identity to SEQ ID NO: 151, and the second nucleic acid sequence has at least 90% sequence identity to SEQ ID NO: 262;
[0040] d. the first nucleic acid sequence has at least 90% sequence identity to SEQ ID NO: 128, and the second nucleic acid sequence has at least 90% sequence identity to SEQ ID NO: 239; and
[0041] e. the first nucleic acid sequence has at least 90% sequence identity to SEQ ID NO: 155, and the second nucleic acid sequence has at least 90% sequence identity to SEQ ID NO: 266.

[0042] In some embodiments, the RNAi agent comprises a sense strand comprising a first nucleic acid sequence, and an antisense strand comprises a second nucleic acid sequence, wherein the first nucleic acid sequence and the second nucleic acid sequence are selected from the group consisting of:
[0043] a. the first nucleic acid sequence has at least 95% sequence identity to SEQ ID NO: 129, and the second nucleic acid sequence has at least 95% sequence identity to SEQ ID NO: 240;
[0044] b. the first nucleic acid sequence has at least 95% sequence identity to SEQ ID NO: 116, and the second nucleic acid sequence has at least 95% sequence identity to SEQ ID NO: 227;
[0045] c. the first nucleic acid sequence has at least 95% sequence identity to SEQ ID NO: 151, and the second nucleic acid sequence has at least 95% sequence identity to SEQ ID NO: 262;
[0046] d. the first nucleic acid sequence has at least 95% sequence identity to SEQ ID NO: 128, and the second nucleic acid sequence has at least 95% sequence identity to SEQ ID NO: 239; and
[0047] e. the first nucleic acid sequence has at least 95% sequence identity to SEQ ID NO: 155, and the second nucleic acid sequence has at least 95% sequence identity to SEQ ID NO: 266.

[0048] In some embodiments, the RNAi agent comprises a sense strand comprising a first nucleic acid sequence, and an antisense strand comprises a second nucleic acid sequence, wherein the first nucleic acid sequence and the second nucleic acid sequence are selected from the group consisting of:
[0049] a. the first nucleic acid sequence comprises SEQ ID NO: 129, and the second nucleic acid sequence comprises SEQ ID NO: 240;
[0050] b. the first nucleic acid sequence comprises SEQ ID NO: 116, and the second nucleic acid sequence comprises SEQ ID NO: 227;
[0051] c. the first nucleic acid sequence comprises SEQ ID NO: 151, and the second nucleic acid sequence comprises SEQ ID NO: 262;
[0052] d. the first nucleic acid sequence comprises SEQ ID NO: 128, and the second nucleic acid sequence comprises SEQ ID NO: 239; and
[0053] e. the first nucleic acid sequence comprises SEQ ID NO: 155, and the second nucleic acid sequence comprises SEQ ID NO: 266.

[0054] In further embodiments, the sense strand and the antisense strand each independently comprise one or more modified nucleotides, such as 2′ fluoro modified nucleotides or 2′-O-methyl modified nucleotides. In still further embodiments of the RNAi agents disclosed herein, each nucleotide of the sense strand and each nucleotide of the antisense strand is a modified nucleotide. In further embodiments, each nucleotide is a 2′ fluoro modified nucleotide or a 2′-O-methyl modified nucleotide.

[0055] In further embodiments of the RNAi agents disclosed herein, the antisense strand is 23 nucleotides in length, each nucleotide of the antisense strand is a modified nucleotide, and 2′ fluoro modified nucleotides are present at
[0056] a. Positions 2, 3, 7, 14, and 16 from the 5′ end of the antisense strand; or
[0057] b. Positions 2, 5, 7, 14, and 16 from the 5′ end of the antisense strand; or
[0058] c. Positions 2, 3, 8, 14, and 16 from the 5′ end of the antisense strand; or
[0059] d. Positions 2, 5, 8, 14, and 16 from the 5′ end of the antisense strand; or
[0060] e. Positions 2, 6, 14, and 16 from the 5′ end of the antisense strand.

[0061] In further embodiments, the nucleotides that are not 2′ fluoro modified nucleotides are 2′-O-methyl modified nucleotides.

[0062] In further embodiments of the RNAi agents disclosed herein, the sense strand and antisense strand each independently comprise one or more modified internucleotide linkages, and each modified internucleotide linkage is a phosphorothioate linkage. In further embodiments, the sense strand and antisense strand each independently comprise four phosphorothioate linkages. In still further embodiments, the two terminal nucleotides at each of the 5′ and 3′ ends of each of the sense and antisense strand are phosphorothioate linkages.

[0063] In other embodiments, the 5′ nucleotide of the antisense strand comprises a phosphate group or a phosphate analog. As used herein, “phosphate analog” means a chemical moiety that mimics the electrostatic and/or steric properties of a phosphate group. In some embodiments, a phosphate analog is positioned at the 5′ terminal nucleotide of an oligonucleotide in place of a 5′-phosphate. A 5′ phosphate analog can include a phosphatase-resistant linkage. Examples of phosphate analogs include, but are not limited to, 5′ phosphonates, such as 5′ methylene phosphonate (5′-MP) and 5′-(E)-vinylphosphonate (5′-VP). An oligonucleotide can have a phosphate analog at a 4′-carbon position of the sugar (referred to as a “4′-phosphate analog”) at a 5′-terminal nucleotide. An example of a 4′-phosphate analog is oxymethylphosphonate, in which the oxygen atom of the oxymethyl group is bound to the sugar moiety (e.g., at its 4′-carbon) or analog thereof. See, e.g., Intl. Patent Application Publication No. WO 2018/045317. Other modifications have been developed for the 5′ end of oligonucleotides (see, e.g., Intl. Patent Application No. WO 2011/133871; U.S. Pat. No. 8,927,513; and Prakash et al. (2015) Nuc. Acids Res. 43:2993-3011).

[0064] In further embodiments of the RNAi agents disclosed herein, the antisense strand comprises a sequence selected from the group consisting of SEQ ID NOs: 340, 342, 344, 346, 348, 350, 352, 354, 356, 358, 360, 362, 364, 366, 368, 370, 372, 374, 376, 378, 380, 382, 384, 386, 388, 390, 392, 394, 396, 398, 400, 402, 404, 406, 408, 410, 412, 414, 416, 418, 420, 422, 424, 426, 428, 430, 432, 434, 436, 438, 440, 442, 444, 446, 448, 450, 452, 454, 456, 458, 460, 462, 464, 466, 468, 470, 472, 474, 476, 478, 480, 482, 484, 486, 488, 490, 492, 494, 496, 498, 500, 502, 504, 506, 508, 510, 512, 514, 516, 518, 520, 522, 524, 526, 528, 530, 532, 534, 536, 538, 540, 542, 544, 546, 548, 550, 552, 554, 556, 558, 560, 562, 563, 566, 567, 569, 570, 571, 575, 579, 581, 583, 585, or a sequence having at least 90% sequence identity thereto, wherein the 5′ terminal nucleotide of the antisense strand comprises a vinyl phosphonate, a phosphate, or a hydroxyl group. In other embodiments, the phosphate group listed at the 5′ end of the recited SEQ ID NO: is removed and replaced with an OH. In other embodiments, the phosphate group listed at the 5′ end of the recited SEQ ID NO: is replaced with a 5′ vinylphosphonate.

[0065] In further embodiments of the RNAi agents disclosed herein, the antisense strand comprises a sequence selected from the group consisting of SEQ ID NOs: 587, 589, 591, 593, 595, 597, 599, 601, 603, 605, 607, 609, 611, 613, 615, 617, 619, 621, 623, 625, 627, 629, 631, 633, 635, 637, 639, 641, 643, 645, 647, 649, 651, 653, 655, 657, 659, 661, 663, 665, 667, 669, 671, 673, 675, 677, 679, 681, 683, 685, 687, 689, 691, 693, 695, 697, 699, 701, 703, 705, 707, 709, 711, 713, 715, 717, 719, 721, 723, 725, 727, 729, 731, 733, 735, 737, 739, 741, 743, 745, 747, 749, 751, 753, 755, 757, 759, 761, 763, 765, 767, 769, 771, 773, 775, 777, 779, 781, 783, 785, 787, 789, 791, 793, 795, 797, 799, 801, 803, 805, 807, 813, 815, 817, 819, or a sequence having at least 90% sequence identity thereto.

[0066] In further embodiments the sense strand comprises a sequence selected from the group consisting of SEQ ID NOs: 339, 341, 343, 345, 347, 349, 351, 353, 355, 357, 359, 361, 363, 365, 367, 369, 371, 373, 375, 377, 379, 381, 383, 385, 387, 389, 391, 393, 395, 397, 399, 401, 403, 405, 407, 409, 411, 413, 415, 417, 419, 421, 423, 425, 427, 429, 431, 433, 435, 437, 439, 441, 443, 445, 447, 449, 451, 453, 455, 457, 459, 461, 463, 465, 467, 469, 471, 473, 475, 477, 479, 481, 483, 485, 487, 489, 491, 493, 495, 497, 499, 501, 503, 505, 507, 509, 511, 513, 515, 517, 519, 521, 523, 525, 527, 529, 531, 533, 535, 537, 539, 541, 543, 545, 547, 549, 551, 553, 555, 557, 559, 561, 564, 565, 568, 574, 578, 580, 582, 584, or a sequence having at least 90% sequence identity thereto.

[0067] In further embodiments the sense strand comprises a sequence selected from the group consisting of SEQ ID NOs: 588, 590, 592, 594, 596, 598, 600, 602, 604, 606, 608, 610, 612, 614, 616, 618, 620, 622, 624, 626, 628, 630, 632, 634, 636, 638, 640, 642, 644, 646, 648, 650, 652, 654, 656, 658, 660, 662, 664, 666, 668, 670, 672, 674, 676, 678, 680, 682, 684, 686, 688, 690, 692, 694, 696, 698, 700, 702, 704, 706, 708, 710, 712, 714, 716, 718, 720, 722, 724, 726, 728, 730, 732, 734, 736, 738, 740, 742, 744, 746, 748, 750, 752, 754, 756, 758, 760, 762, 764, 766, 768, 770, 772, 774, 776, 778, 780, 782, 784, 786, 788, 790, 792, 794, 796, 798, 800, 802, 804, 806, 808, 809, 810, 811, 812, 814, 816, 818, or a sequence having at least 90% sequence identity thereto.

[0068] In still further embodiments of the RNAi agents disclosed herein, the sense strand and antisense strand are a pair of oligonucleotide sequences selected from Table 4A or 4B, or a sequence that is at least 80, 81, 82, 83, 84, 85, 86, 87, 88, 89, 90, 91, 92, 93, 94, 95, 96, 97, 98, or 99 percent identical to the sequence in Table 4A or 4B. In further embodiments, 1, 2, or 3 mismatches are introduced into the sense strand of the pair in Table 4A, Table 4B or Table 7. In further embodiments, 1, 2, or both terminal nucleotides of 5′ end of the antisense strand are changed.

[0069] In some embodiments, the RNAi agent comprises a sense strand comprising a first nucleic acid sequence, and an antisense strand comprises a second nucleic acid sequence, wherein the first nucleic acid sequence and the second nucleic acid sequence are selected from the group consisting of:
[0070] a. the first nucleic acid sequence has at least 95% sequence identity to SEQ ID NO: 339, and the second nucleic acid sequence has at least 95% sequence identity to SEQ ID NO: 340;
[0071] b. the first nucleic acid sequence has at least 95% sequence identity to SEQ ID NO: 341, and the second nucleic acid sequence has at least 95% sequence identity to SEQ ID NO: 342;
[0072] c. the first nucleic acid sequence has at least 95% sequence identity to SEQ ID NO: 343, and the second nucleic acid sequence has at least 95% sequence identity to SEQ ID NO: 344;
[0073] d. the first nucleic acid sequence has at least 95% sequence identity to SEQ ID NO:345, and the second nucleic acid sequence has at least 95% sequence identity to SEQ ID NO: 346;
[0074] e. the first nucleic acid sequence has at least 95% sequence identity to SEQ ID NO: 347, and the second nucleic acid sequence has at least 95% sequence identity to SEQ ID NO: 348;
[0075] f. the first nucleic acid sequence has at least 95% sequence identity to SEQ ID NO: 349, and the second nucleic acid sequence has at least 95% sequence identity to SEQ ID NO: 350;
[0076] g. the first nucleic acid sequence has at least 95% sequence identity to SEQ ID NO: 353, and the second nucleic acid sequence has at least 95% sequence identity to SEQ ID NO: 354;
[0077] h. the first nucleic acid sequence has at least 95% sequence identity to SEQ ID NO: 363 and the second nucleic acid sequence has at least 95% sequence identity to SEQ ID NO: 364; and
[0078] i. the first nucleic acid sequence has at least 95% sequence identity to SEQ ID NO: 381, and the second nucleic acid sequence has at least 95% sequence identity to SEQ ID NO: 382.

[0079] In some embodiments, the RNAi agent comprises a sense strand comprising a first nucleic acid sequence, and an antisense strand comprises a second nucleic acid sequence, wherein the first nucleic acid sequence and the second nucleic acid sequence are selected from the group consisting of:
[0080] a. the first nucleic acid sequence has at least 90% sequence identity to SEQ ID NO: 564 or 809, and the second nucleic acid sequence has at least 90% sequence identity to SEQ ID NO: 571;
[0081] b. the first nucleic acid sequence has at least 90% sequence identity to SEQ ID NO: 568 or 811, and the second nucleic acid sequence has at least 90% sequence identity to SEQ ID NO: 567;
[0082] c. the first nucleic acid sequence has at least 90% sequence identity to SEQ ID NO: 580 or 814, and the second nucleic acid sequence has at least 90% sequence identity to SEQ ID NO: 581 or 815;
[0083] d. the first nucleic acid sequence has at least 90% sequence identity to SEQ ID NO: 582 or 816, and the second nucleic acid sequence has at least 90% sequence identity to SEQ ID NO: 583 or 817; and
[0084] e. the first nucleic acid sequence has at least 90% sequence identity to SEQ ID NO: 584 or 818, and the second nucleic acid sequence has at least 90% sequence identity to SEQ ID NO: 585 or 819.

[0085] In some embodiments, the RNAi agent comprises a sense strand comprising a first nucleic acid sequence, and an antisense strand comprises a second nucleic acid sequence, wherein the first nucleic acid sequence and the second nucleic acid sequence are selected from the group consisting of:
[0086] a. the first nucleic acid sequence has at least 95% sequence identity to SEQ ID NO: 564 or 809, and the second nucleic acid sequence has at least 95% sequence identity to SEQ ID NO: 571;
[0087] b. the first nucleic acid sequence has at least 95% sequence identity to SEQ ID NO: 568 or 811, and the second nucleic acid sequence has at least 95% sequence identity to SEQ ID NO: 567;
[0088] c. the first nucleic acid sequence has at least 95% sequence identity to SEQ ID NO: 580 or 814, and the second nucleic acid sequence has at least 95% sequence identity to SEQ ID NO: 581 or 815;
[0089] d. the first nucleic acid sequence has at least 95% sequence identity to SEQ ID NO: 582 or 816, and the second nucleic acid sequence has at least 95% sequence identity to SEQ ID NO: 583 or 817; and
[0090] e. the first nucleic acid sequence has at least 95% sequence identity to SEQ ID NO: 584 or 818, and the second nucleic acid sequence has at least 95% sequence identity to SEQ ID NO: 585 or 819.

[0091] In some embodiments, the RNAi agent comprises a sense strand comprising a first nucleic acid sequence, and an antisense strand comprises a second nucleic acid sequence, wherein the first nucleic acid sequence and the second nucleic acid sequence are selected from the group consisting of:
[0092] a. the first nucleic acid sequence comprises SEQ ID NO: 564 or 809, and the second nucleic acid sequence comprises SEQ ID NO: 571;
[0093] b. the first nucleic acid sequence comprises SEQ ID NO: 568 or 811, and the second nucleic acid sequence comprises SEQ ID NO: 567;
[0094] c. the first nucleic acid sequence comprises SEQ ID NO: 580 or 814, and the second nucleic acid sequence comprises SEQ ID NO: 581 or 815;
[0095] d. the first nucleic acid sequence comprises SEQ ID NO: 582 or 816, and the second nucleic acid sequence comprises SEQ ID NO: 583 or 817; and
[0096] e. the first nucleic acid sequence comprises SEQ ID NO: 584 or 818, and the second nucleic acid sequence comprises SEQ ID NO: 585 or 819.

[0097] In some embodiments, the RNAi agent comprises a sense strand comprising a first nucleic acid sequence, and an antisense strand comprises a second nucleic acid sequence, wherein the first nucleic acid sequence and the second nucleic acid sequence are selected from the group consisting of:
[0098] a. the first nucleic acid sequence consists of SEQ ID NO: 564 or 809, and the second nucleic acid sequence consists of SEQ ID NO: 571;
[0099] b. the first nucleic acid sequence consists of SEQ ID NO: 568 or 811, and the second nucleic acid sequence consists of SEQ ID NO: 567;
[0100] c. the first nucleic acid sequence consists of SEQ ID NO: 580 or 814, and the second nucleic acid sequence consists of SEQ ID NO: 581 or 815;
[0101] d. the first nucleic acid sequence consists of SEQ ID NO: 582 or 816, and the second nucleic acid sequence consists of SEQ ID NO: 583 or 817; and
[0102] e. the first nucleic acid sequence consists of SEQ ID NO: 584 or 818, and the second nucleic acid sequence consists of SEQ ID NO: 585 or 819.

[0103] In further embodiments, the 5′ terminal nucleotide of the antisense strand is substituted such that the final sequence contains a vinylphosphonate, a phosphate group, or an OH group. For example, for antisense sequences of SEQ ID NOs: 340, 342, 344, 346, 348, 350, 352, 354, 356, 358, 360, 362, 364, 366, 368, 370, 372, 374, 376, 378, 380, 382, 384, 386, 388, 390, 392, 394, 396, 398, 400, 402, 404, 406, 408, 410, 412, 414, 416, 418, 420, 422, 424, 426, 428, 430, 432, 434, 436, 438, 440, 442, 444, 446, 448, 450, 452, 454, 456, 458, 460, 462, 464, 466, 468, 470, 472, 474, 476, 478, 480, 482, 484, 486, 488, 490, 492, 494, 496, 498, 500, 502, 504, 506, 508, 510, 512, 514, 516, 518, 520, 522, 524, 526, 528, 530, 532, 534, 536, 538, 540, 542, 544, 546, 548, 550, 552, 554, 556, 558, 560, 562, 563, 566, 567, 569, 570, 571, 575, 579, 581, 583, 585, or a sequence having at least 90% sequence identity thereto, the 5′ phosphate group is replaced with an OH group.

[0104] In other embodiments disclosed herein are RNAi agents having a delivery moiety of Formula I conjugated to R:

[chemical structure]

wherein R is a dsRNA comprises a sense strand and an antisense strand, wherein the antisense strand comprises at least 15 contiguous nucleotides that have complementarity to FAS mRNA target sequence of SEQ ID NO:1, and wherein the sense strand and the antisense strand form a region of complementarity of at least 15 nucleotides, and wherein the sense strand and antisense strand are each independently 18 to 23 nucleotides in length, and optionally wherein the sense strand and antisense strand each independently comprise one or more modified nucleotides, and optionally wherein the sense strand and the antisense strand each independently comprise one or more modified internucleotide linkages, and wherein R is optionally conjugated to Formula I via a linker. In further embodiments, the sense or the antisense strand is selected from Table 2, 3A, 3B, 4A, 4B, 7, or 8 disclosed herein. In other embodiments, the antisense or antisense strand of the RNAi agent has a sequence of at least 80%, 81%, 82%, 83%, 84%, 85%, 86%, 87%, 88%, 89%, 90%, 91%, 92%, 93%, 94%, 95%, 96%, 97%, 98%, or 99% sequence identity to the corresponding sequence selected from Table 2, 3A, 3B, 4A, 4B, 7, or 8 herein.

[0105] In other embodiments, the RNAi agent disclosed herein comprises a linker. In further embodiments, R is conjugated to Formula I via a linker. In other further embodiments R is conjugated to Formula I via a linker. In further embodiments, the linker comprises a linker of Formula II having connection points A and B or the linker comprises Formula III having connection points C and D, and wherein:

[chemical structure]

[0106] a. Formula I is conjugated to Formula II at connection point A and Formula II is conjugated to a phosphate group at connection point B, and the phosphate group is conjugated to R; or
[0107] b. Formula I is conjugated to Formula III at connection point C and Formula III is conjugated to a phosphate group at connection point D, and the phosphate group is further conjugated to R.

[0108] In other embodiments wherein the RNAi agent comprises a linker, R is conjugated to Formula I via a linker, and the linker is a linker comprising Formula III having connection points C and D:

[chemical structure]

and wherein Formula I is conjugated to Formula III at connection point C and Formula III is conjugated to a phosphate group at connection point D, and the phosphate group is further conjugated to R.

[0109] The sense strand and antisense strand of FAS RNAi agent can be synthesized using any nucleic acid polymerization methods known in the art, for example, solid-phase synthesis by employing phosphoramidite chemistry methodology (e.g., Current Protocols in Nucleic Acid Chemistry, Beaucage, S. L. et al. (Edrs.), John Wiley & Sons, Inc., New York, NY, USA), H-phosphonate, phosphortriester chemistry, or enzymatic synthesis. Automated commercial synthesizers can be used, for example, MerMade™ 12 from LGC Biosearch Technologies, or other synthesizers from BioAutomation or Applied Biosystems. Phosphorothioate linkages can be introduced using a sulfurizing reagent such as phenylacetyl disulfide or DDTT (((dimethylaminomethylidene) amino)-3H-1,2,4-dithiazaoline-3-thione). It is well known to use similar techniques and commercially available modified amidites and controlled-pore glass (CPG) products to synthesize modified oligonucleotides.

[0110] In still other embodiments, the RNAi agent is capable of decreasing expression of the FAS gene in a liver cell. In other embodiments, the RNAi agents disclosed herein are for use in therapy. In further embodiments, the use is for the treatment of AIH.

[0111] The RNAi agents may be formulated into pharmaceutical compositions. Accordingly, disclosed herein are pharmaceutical compositions comprising the RNAi agent disclosed herein, and one or more pharmaceutically acceptable excipients. Pharmaceutical compositions can be prepared by methods well known in the art (e.g., Remington: The Science and Practice of Pharmacy, 23rd edition (2020), A. Loyd et al., Academic Press).

[0112] In other embodiment are uses of the RNAi agents herein for the manufacture of a medicament for the treatment of AIH.

[0113] In other embodiments are methods of treating AIH, in patients in need thereof, comprising administering a FAS RNAi agent disclosed herein, or a pharmaceutical composition thereof.

[0114] The RNAi agent can be administered to the patient intravenously or subcutaneously.

[0115] RNAi dosage regimens may be adjusted to provide the optimum desired response (e.g., a therapeutic response). For example, a single bolus may be administered, several divided doses may be administered over time, or the dose may be proportionally reduced or increased as indicated by the exigencies of the therapeutic situation.

[0116] Dosage values may vary with the type and severity of the condition to be alleviated. It is further understood that for any particular subject, specific dosage regimens should be adjusted over time according to the individual need and the professional judgment of the person administering or supervising the administration of the compositions.

[0117] In other embodiments are methods of decreasing FAS expression in a cell, comprising contacting the cell with an RNAi agent disclosed herein, and incubating the cell for a time sufficient for decreasing the level of FAS mRNA by at least 50% as compared to an untreated or control treated cell.

### Examples

[0118] Certain abbreviations are defined as follows: “1,2-DCE” refers to 1,2-dichloroethane; “DCM” refers to dichloromethane; “DIEA” refers to N,N-diisopropylethylamine; “DMF” refers to N,N-dimethylformamide; “DMAP” refers to 4-dimethylaminopyridine; “DMTCl” refers to 4,4′-dimethoxytrityl chloride; “DPP4” refers to dipeptidyl peptidase; “EDC” refers to 1-ethyl-3-(3-dimethylaminopropyl)carbodiimide; “EtOAc” refers to ethyl acetate; “GalNAc” refers to N-acetylgalactosamine; “HATU” refers to 1-[bis(dimethylamino)methylene]-1H-1,2,3-triazolo[4,5-b]pyridinium 3-oxid hexafluorophosphate; “HBTU” refers to 0-(benzotriazol-1-yl)-N,N,N′,N′-tetramethyluronium hexafluorophosphate; “HOBt” refers to 1-hydroxybenzotriazole hydrate; “HPRT” refers to hypoxanthine-guanine phosphoribosyltransferase; “IPA” refers to isopropanol and isopropyl alcohol; “LDHA” refers to lactate dehydrogenase-A; “MeCN” refers to acetonitrile; “MeOH” refers to methanol and methyl alcohol; “MWCO” refers to molecular weight cut-off, “NHS” refers to N-hydroxysuccinimide; “OD” refers to optical density; “PBS” refers to phosphate-buffered saline; “PhSiH3” refers to phenylsilane; “PTS” refers to portable endotoxin testing system; “siRNA” refers to small interfering ribonucleic acid; “TEA” refers to triethylamine; “TFA” refers to trifluoroacetic acid; “THF” refers to tetrahydrofuran; “TLC” refers to thin line chromatography; and “TMP” refers to 2,2,6,6-tetramethylpiperidine.

[0119] A delivery moiety comprising Formula I may be made by the following nonlimiting synthetic steps and schemes.

[chemical structure]

[0120] Scheme 1, step A, depicts the cyclization of compound (1) using trimethyl trifluoromethanesulfonate in a solvent such as 1,2-DCE to give compound (2). Step B shows the addition of hex-5-en-1-ol to compound (2) using trimethylsilyl trifluoromethanesulfonate in a solvent such as 1,2-DCE to give compound (3). The oxidation of compound (3) using an appropriate oxidizing agent such as sodium periodate with a catalyst such as ruthenium(III) chloride to give compound (4) is shown in step C.

[chemical structure]

[0121] Scheme 2, step A, shows an amide coupling between compound (5) and tert-butyl N-[2-[2-(tert-butoxycarbonylamino)ethylamino]ethyl]carbamate using HBTU and HOBt with an appropriate base such as DIEA in a solvent such as DMF to give compound (6). Step B depicts a basic hydrolysis of compound (6) using a base such as aqueous NaOH in a THF and MeOH solvent system to give compound (7). Step C shows an amide coupling between compound (7) and allyl 11-aminoundecanoate hydrochloride using HATU with an appropriate base such as DIEA in a solvent such as DMF to give compound (8). Step D shows the acidic deprotection of compound (8) with TFA in a solvent such as DCM to give compound (9). The amide coupling between compound (9) and compound (4) using EDC and HOBt in a solvent such as DCM to give compound (10) is shown in step E. Step F shows the deprotection of compound (10) with tetrakis(triphenylphosphine)palladium and PhSiH3 in a solvent such as DCM to give compound (11). Step F depicts the coupling of compound (11) with NHS using EDC in a solvent such as DCM to give compound (12).

[chemical structure]

[0122] Scheme 3, steps A-C are essentially analogous to those of scheme 2, steps C-E beginning with compound (7) to give compounds (13), (14), and (15). Step D depicts the hydrogenation of compound (15) using palladium on carbon in a solvent such as MeOH to give compound (16). Step E is essentially analogous to the preparation of scheme 2, step G to give compound (17).

[chemical structure]

[0123] Scheme 4, steps A-I, are composed of a series of amide couplings and deprotections using methods essentially analogous to those found in schemes 2 and 3 beginning with compound (18) to give compound (27).

[chemical structure]

[0124] Scheme 5, steps A-C depict methods essentially analogous to those found in scheme 4, steps G-I beginning with compound (24) to give compound (30).

[chemical structure]

[0125] Scheme 6, step A depicts the protection of compound (31) using DMTCl with a suitable base such as DIEA in a solvent such as DCM to give compound (32). Step B shows an amide coupling between compound (32) and piperidin-4-yl methanol using HBTU and HOBt with TMP in a solvent such as DCM to give compound (33). The deprotection of compound (33) with 20% piperidine in DMF to give compound (34) is shown in step C.

[chemical structure]

[0126] Scheme 7, step A is essentially analogous to scheme 2, step A to give compound (35) from the coupling of compounds (16) and (34). Step B shows the formation of compound (36) by adding succinic anhydride to compound (35) in an appropriate solvent such as DCM with a base system of TEA and DMAP. Step C depicts the loading of compound (36) onto resin with 2-(1H-benzotriazol-1-yl)-1,1,3,3-tetramethyluronium hexafluorophosphate and a base such as DIEA in a solvent system such as MeCN and DCM to give compound (37).

### Preparation 1

### (6,7-Diacetoxy-2-methyl-5,6,7,7a-tetrahydro-3aH-pyrano[3,2-d]oxazol-5-yl)methyl acetate

[chemical structure]

[0127] To a solution of (5-acetamido-3,4,6-triacetoxy-tetrahydropyran-2-yl)methyl acetate (9.00 g, 23.1 mmol) in 1,2-DCE (46 mL) is added trimethylsilyl trifluoromethanesulfonate (6.5 mL, 35 mmol). The mixture is heated to 50° C. and stirred for 18 hours. After this time, the mixture is diluted with DCM (200 mL), washed with saturated NaHCO₃ (200 mL), and saturated aqueous sodium chloride solution (200 mL), dried over sodium sulfate, filtered, and concentrated in vacuo. The resulting residue is purified by silica gel flash chromatography eluting with 0-10% MeOH/DCM to give the title compound (6.434 g, 84%). ES/MS m/z 330 (M+H).

### Preparation 2

### (5-Acetamido-3,4-diacetoxy-6-hex-5-enoxy-tetrahydropyran-2-yl)methyl acetate

[chemical structure]

[0128] To a solution of (6,7-diacetoxy-2-methyl-5,6,7,7a-tetrahydro-3aH-pyrano[3,2-d]oxazol-5-yl)methyl acetate (30.43 g, 92.42 mmol) in 1,2-DCE (231 mL) is added hex-5-en-1-ol (22.2 mL, 185 mmol) followed by activated powdered 4 Å molecular sieves (15.6 g). The suspension is stirred at ambient temperature for 30 minutes and trimethylsilyl trifluoromethanesulfonate (19 mL, 101.9 mmol) is then added. The mixture is stirred at ambient temperature for 18 hours. After this time, the solution is filtered through diatomaceous earth and concentrated in vacuo. The resulting residue is purified by silica gel flash chromatography eluting with 30-100% EtOAc/hexanes to give the title compound (34.76 g, 86%). ES/MS m/z 430.4 (M+H).

### Preparation 3

### 5-[3-Acetamido-4,5-diacetoxy-6-(acetoxymethyl)tetrahydropyran-2-yl]oxypentanoic acid

[chemical structure]

[0129] A solution of (5-acetamido-3,4-diacetoxy-6-hex-5-enoxy-tetrahydropyran-2-yl)methyl acetate (34.76 g, 80.93 mmol) in MeCN (174 mL) and DCM (174 mL) is cooled to 0° C. A solution of sodium periodate (22.4 g, 104.7 mmol) is added and stirring is continued at 0° C. for 10 minutes. After this time, ruthenium(III) chloride (270 mg, 1.3 mmol) is added and the mixture is stirred while warming to ambient temperature. After stirring for 2 hours, additional sodium periodate (66 g, 308.4 mmol) is added and stirring is continued for 18 hours. After this time, the mixture is extracted with 3:1 CH3Cl:IPA (2×500 mL), washed with saturated aqueous sodium chloride solution (1 L), dried over sodium sulfate, filtered, and concentrated in vacuo. The resulting residue is purified by silica gel flash chromatography eluting with 0-40% MeOH/DCM to give the title compound (29.75 g, 82%). ES/MS m/z 448.4 (M+H).

### Preparation 4

### Benzyl 6-aminohexanoate hydrochloride

[chemical structure]

[0130] To a suspension of 6-aminohexanoic acid (5.00 g, 38.1 mmol) in THE (38 mL) is added benzyl alcohol (47 mL, 453.7 mmol) and the mixture is cooled to 0° C. Thionyl chloride (8.6 mL, 120 mmol) is added dropwise and the mixture is stirred for 18 hours while warming to ambient temperature. After this time, ether (166 mL) is added and the reaction vessel is transferred to a freezer at −20° C. for 1 hour. After this time, the solid precipitate is collected by filtration to give the title compound (8.57 g, 81%). ES/MS m/z 222 (M+H).

### Preparation 5

### Benzyl 11-aminoundecanoate hydrochloride

[chemical structure]

[0131] The title compound is prepared from 11-aminoundecanoic acid in a manner essentially analogous to the method of preparation 4. ES/MS m/z 292.2 (M+H).

### Preparation 6

### Allyl 11-aminoundecanoate hydrochloride

[chemical structure]

[0132] A vessel is charged with 11-aminoundecanoic acid (9.00 g, 44.7 mmol) in allyl alcohol (42 mL) and the mixture is cooled to 0° C. Thionyl chloride (6.5 mL, 89.4 mmol) is added and the mixture is stirred for 18 hours while warming to ambient temperature. After this time, the mixture is concentrated in vacuo and ether (200 mL) is added to the residue to obtain a white suspension. The mixture is stirred at ambient temperature for 10 minutes and the solid precipitate is collected by filtration to obtain the product (12.0 g, 97%). ES/MS m/z 242.2 (M+H).

### Preparation 7

### (2S)-3-[Bis(4-methoxyphenyl)-phenyl-methoxy]-2-(9H-fluoren-9ylmethoxycarbonylamino) propanoic acid

[chemical structure]

[0133] To a stirring solution of (2S)-2-(9H-fluoren-9-ylmethoxycarbonylamino)-3-hydroxy-propanoic acid (40 g, 0.122 mol) in dry DCM (400 mL) is added DIEA (64 mL, 0.366 mol) at 0° C. under inert atmosphere. To this, a solution of DMTCl (49.6 g, 0.146 mol) in DCM (200 mL) is added slowly. The resulting reaction mixture is brought to ambient temperature and stirred for 16 hours. After this time, the reaction mixture is diluted with water (12.5 vol) and extracted with DCM (25 vol). The organic layer is dried over anhydrous sodium sulphate, filtered, and concentrated in vacuo. The crude obtained is washed with 10% EtOAc/hexane (12.5 vol) and dried under vacuum to give the title compound as a pale brown solid (62 g, crude). This material was taken to next step without any further purification. TLC: 5% MeOH/CH2Cl2 (Rf: 0.5) UV, 254 nM.

### Preparation 8

### 9H-Fluoren-9-ylmethyl N-[(1S)-1-[[bis(4-methoxyphenyl)-phenyl-methoxy]methyl]-2-[4-(hydroxymethyl)-1-piperidyl]-2-oxo-ethyl]carbamate

[chemical structure]

[0134] To a stirring solution of (2S)-3-[bis(4-methoxyphenyl)-phenyl-methoxy]-2-(9H-fluoren-9ylmethoxycarbonylamino) propanoic acid (62 g, 0.103 mol) in DCM (750 mL) are added slowly HBTU (78.3 g, 0.206 mol), HOBt (27.9 g, 0.206 mol), and piperidin-4-yl methanol (15.4 g, 0.134 mol) followed by TMP (15 mL, 0.113 mol) at 0° C. under inert atmosphere. The resulting reaction mixture is brought to ambient temperature and stirred for 4 hours. After this time, the reaction mixture is diluted with water (8 vol) and extracted with DCM (15 vol). The organic layer is dried over anhydrous sodium sulphate, filtered, and concentrated in vacuo. The resulting residue is purified by silica gel flash chromatography eluting with 20-40% EtOAc/hexane and 1% MeOH/DCM to give the title compound (40 g, 52% over two steps). 1H NMR (DMSO-d6) δ 7.88 (br d, J=7.5 Hz, 2H), 7.79-7.59 (m, 3H), 7.45-7.12 (m, 13H), 6.92-6.76 (m, 4H), 4.79-4.44 (m, 2H), 4.32 (br d, J=11.4 Hz, 2H), 4.20 (br s, 2H), 3.71 (s, 6H), 3.21 (br s, 4H), 2.99-2.79 (m, 1H), 2.69 (br s, 2H), 1.81-1.43 (m, 3H), 1.08-0.73 (m, 2H).

### Preparation 9

### (2S)-2-Amino-3-[bis(4-methoxyphenyl)-phenyl-methoxy]-1-[4-(hydroxymethyl)-1-piperidyl]propan-1-one

[chemical structure]

[0135] A solution of 20% piperidine in DMF (400 mL) is added slowly to 9H-fluoren-9-ylmethyl N-[(1S)-1-[[bis(4-methoxyphenyl)-phenyl-methoxy]methyl]-2-[4-(hydroxymethyl)-1-piperidyl]-2-oxo-ethyl]carbamate (40 g, 0.055 mol) at 0° C. under inert atmosphere. The resulting reaction mixture is stirred at ambient temperature for 1 hour. After this time, the mixture is diluted with water (15 vol) and extracted with EtOAc (30 vol). The organic layer is dried over anhydrous sodium sulphate, filtered, and concentrated in vacuo. The resulting residue is purified by silica gel flash chromatography eluting with 1-8% MeOH/DCM to give the title compound as an off white solid (13 g, 47%). ES/MS m/z 1009.5 (2M+H).

### Preparation 10

### Methyl (2S)-5-[bis[2-(tert-butoxycarbonylamino)ethyl]amino]-2-(tert-butoxycarbonylamino)-5-oxo-pentanoate

[chemical structure]

[0136] To a flask containing (S)-4-((tert-butoxycarbonyl)amino)-5-methoxy-5-oxopentanoic acid (7.00 g, 26.8 mmol) and HOBt (4.16 g, 30.8 mmol) are added DMF (179 mL) and (2-(1H-benzotriazol-1-yl)-1,1,3,3-tetramethyluronium hexafluorophosphate (11.7 g, 30.9 mmol). DIEA (14 mL, 80.3 mmol) is added and the mixture is stirred at ambient temperature for 5 minutes. After this time, tert-butyl N-[2-[2-(tert-butoxycarbonylamino)ethylamino]ethyl]carbamate (8.94 g, 29.5 mmol) is added in one portion and stirring is continued at ambient temperature. After stirring for 18 hours, the mixture is diluted with EtOAc (400 mL), washed with water (2×400 mL) and saturated aqueous sodium chloride solution (400 mL), dried over sodium sulfate, filtered, and concentrated in vacuo. The resulting residue is purified by silica gel flash chromatography eluting with 40-100% EtOAc/hexanes to give the title compound (13.01 g, 89%). ES/MS m/z 547.40 (M+H).

### Preparation 11

### (2S)-5-[Bis[2-(tert-butoxycarbonylamino)ethyl]amino]-2-(tert-butoxycarbonylamino)-5-oxo-pentanoic acid

[chemical structure]

[0137] A flask is charged with methyl (2S)-5-[bis[2-(tert-butoxycarbonylamino)ethyl]amino]-2-(tert-butoxycarbonylamino)-5-oxo-pentanoate (13.01 g, 23.8 mmol), THE (120 mL), and MeOH (120 mL). 1N NaOH (71 mL, 71 mmol) is added and the mixture is stirred at ambient temperature. After 1 hour, the mixture is concentrated in vacuo and redissolved in water (300 mL). 5N HCl (12 mL) is added to bring the pH to 4. The mixture is extracted with DCM (3×300 mL) and the combined organic layers are washed with saturated aqueous sodium chloride solution (1 L), dried over sodium sulfate, filtered, and concentrated to give the title compound (12.41 g, 98%). ES/MS m/z 531.60 (M−H).

### Preparation 12

### Allyl 11-[[(2S)-5-[bis[2-(tert-butoxycarbonylamino)ethyl]amino]-2-(tert-butoxycarbonylamino)-5-oxo-pentanoyl]amino]undecanoate

[chemical structure]

[0138] To a flask containing (2S)-5-[bis[2-(tert-butoxycarbonylamino)ethyl]amino]-2-(tert-butoxycarbonylamino)-5-oxo-pentanoic acid (500 mg, 0.94 mmol) and allyl 11-aminoundecanoate hydrochloride (313 mg, 1.13 mmol) is added DMF (6.25 mL) and (1-[bis(dimethylamino)methylene]-1H-1,2,3-triazolo[4,5-b]pyridinium 3-oxide hexafluorophosphate (428 mg, 1.12 mmol). Following addition of DIEA (0.5 mL, 3 mmol) the mixture is stirred at ambient temperature for 18 hours. After this time, the mixture is diluted with EtOAc (200 mL), washed with water (3×200 mL) and saturated aqueous sodium chloride solution (200 mL), dried over sodium sulfate, filtered, and concentrated in vacuo. The resulting residue is purified by silica gel flash chromatography eluting with 40-100% EtOAc/hexanes to give the title compound (687 mg, 97%). 1H NMR (DMSO-d6) δ 7.78-7.64 (m, 1H), 6.98-6.7 (m, 2H), 5.96-5.84 (m, 1H), 5.31-5.25 (m, 1H), 5.23-5.17 (m, 1H), 4.56-4.50 (m, 2H), 3.88-3.67 (m, 1H), 3.30-3.19 (m, 4H), 3.11-2.91 (m, 6H), 2.35-2.12 (m, 4H), 1.88-1.65 (m, 2H), 1.58-1.47 (m, 2H), 1.46-1.30 (m, 30H), 1.30-1.18 (m, 12H).

### Preparation 13

### Allyl (S)-11-(2-amino-5-(bis(2-aminoethyl)amino)-5-oxopentanamido)undecanoate

[chemical structure]

[0139] To a solution of allyl 11-[[(2S)-5-[bis[2-(tert-butoxycarbonylamino)ethyl]amino]-2-(tert-butoxycarbonylamino)-5-oxo-pentanoyl]amino]undecanoate (687 mg, 0.91 mmol) in DCM (15 mL) is added TFA (15 mL). The mixture is stirred at ambient temperature. After 1.5 hours, the mixture is concentrated in vacuo. The residue is taken up in MeOH and applied to an ion exchange cartridge. The cartridge is eluted with MeOH (150 mL) followed by 7N NH3/MeOH (150 mL). The basic fraction is concentrated in vacuo to give the title compound (410 mg, 99%). ES/MS m/z 456.4 (M+H).

### Preparation 14

### Allyl 11-[[(2S)-2-[5-[3-acetamido-4,5-diacetoxy-6-(acetoxymethyl)tetrahydropyran-2-yl]oxypentanoylamino]-5-[bis[2-[5-[3-acetamido-4,5-diacetoxy-6-(acetoxymethyl)tetrahydropyran-2-yl]oxypentanoylamino]ethyl]amino]-5-oxo-pentanoyl]amino]undecanoate

[chemical structure]

[0140] A flask is charged with 5-[3-acetamido-4,5-diacetoxy-6-(acetoxymethyl)tetrahydropyran-2-yl]oxypentanoic acid (489 mg, 1.09 mmol) and allyl (S)-11-(2-amino-5-(bis(2-aminoethyl)amino)-5-oxopentanamido)undecanoate (150 mg, 0.33 mmol). DCM (3.35 mL) is added followed by 1-hydroxybenzotriazole monohydrate (164 mg, 1.07 mmol) and 1-(3-dimethylaminopropyl)-3-ethylcarbodiimide hydrochloride (206 mg, 1.07 mmol). The mixture is stirred at ambient temperature for 18 hours. After this time, the solution is diluted with EtOAc (100 mL), washed with saturated NaHCO₃ (2×100 mL), saturated aqueous NH4Cl (100 mL), and saturated aqueous sodium chloride solution (100 mL). The organic layer is dried over sodium sulfate, filtered, and concentrated in vacuo. The resulting residue is purified by silica gel flash chromatography eluting with 0-10% MeOH/DCM to give the title compound (424 mg, 74%). ES/MS m/z 872.80 (M+2H)/2.

### Preparation 15

### 11-[[(2S)-2-[5-[3-Acetamido-4,5-diacetoxy-6-(acetoxymethyl)tetrahydropyran-2-yl]oxypentanoylamino]-5-[bis[2-[5-[3-acetamido-4,5-diacetoxy-6-(acetoxymethyl)tetrahydropyran-2-yl]oxypentanoylamino]ethyl]amino]-5-oxo-pentanoyl]amino]undecanoic acid

[chemical structure]

[0141] To a solution of allyl 11-[[(2S)-2-[5-[3-acetamido-4,5-diacetoxy-6-(acetoxymethyl)tetrahydropyran-2-yl]oxypentanoylamino]-5-[bis[2-[5-[3-acetamido-4,5-diacetoxy-6-(acetoxymethyl)tetrahydropyran-2-yl]oxypentanoylamino]ethyl]amino]-5-oxo-pentanoyl]amino]undecanoate (354 mg, 0.20 mmol) in DCM (2 mL) is added tetrakis(triphenylphosphine)palladium (29 mg, 0.02 mmol) followed by PhSiH3 (51 uL, 0.41 mmol). The mixture is stirred at ambient temperature for 2 hours, after which it is diluted with saturated aqueous NaHCO₃ (100 mL). 1N NaOH (15 mL) is added to bring the pH to about 10. The aqueous solution is washed with DCM (3×100 mL) and then acidified with concentrated HCl (5 mL) and then aqueous 5N HCl (15 mL). The aqueous layer is extracted with DCM (100 mL) and the organic layer is dried over sodium sulfate, filtered, and concentrated in vacuo. The resulting residue is purified by silica gel flash chromatography eluting with 0-20% MeOH/DCM to give the title compound (151 mg, 44%). ES/MS m/z 852.60 (M+2H)/2.

### Preparation 16

### (2,5-Dioxopyrrolidin-1-yl) 11-[[(2S)-2-[5-[3-acetamido-4,5-diacetoxy-6-(acetoxymethyl)tetrahydropyran-2-yl]oxypentanoylamino]-5-[bis[2-[5-[3-acetamido-4,5-diacetoxy-6-(acetoxymethyl)tetrahydropyran-2-yl]oxypentanoylamino]ethyl]amino]-5-oxo-pentanoyl]amino]undecanoate

[chemical structure]

[0142] To a reaction vial are added 11-[[(2S)-2-[5-[3-acetamido-4,5-diacetoxy-6-(acetoxymethyl)tetrahydropyran-2-yl]oxypentanoylamino]-5-[bis[2-[5-[3-acetamido-4,5-diacetoxy-6-(acetoxymethyl)tetrahydropyran-2-yl]oxypentanoylamino]ethyl]amino]-5-oxo-pentanoyl]amino]undecanoic acid (50 mg, 0.03 mmol), N-hydroxysuccinimide (5 mg, 0.04 mmol), and 1-(3-dimethylaminopropyl)-3-ethylcarbodiimide hydrochloride (8 mg, 0.04 mmol). DCM (0.3 mL) is added and the mixture is stirred at ambient temperature. After 18 hours, the mixture is loaded directly onto a silica gel cartridge and the crude mixture is purified by silica gel flash chromatography eluting with 0-10% MeOH/DCM to give the title compound (49 mg, 93%). ES/MS m/z 901.40 (M+2H)/2.

### Preparation 17

### Benzyl 6-[[(2S)-5-[bis[2-(tert-butoxycarbonylamino)ethyl]amino]-2-(tert-butoxycarbonylamino)-5-oxo-pentanoyl]amino]hexanoate

[chemical structure]

[0143] The title compound is prepared from (2S)-5-[bis[2-(tert-butoxycarbonylamino)ethyl]amino]-2-(tert-butoxycarbonylamino)-5-oxo-pentanoic acid and benzyl 6-aminohexanoate hydrochloride in a manner essentially analogous to the method of preparation 10. ES/MS m/z 736.40 (M+H).

### Preparation 18

### Benzyl 6-[[(2S)-2-amino-5-[bis(2-aminoethyl)amino]-5-oxo-pentanoyl]amino]hexanoate tris(trifluoroacetic acid)

[chemical structure]

[0144] To a solution of benzyl 6-[[(2S)-5-[bis[2-(tert-butoxycarbonylamino)ethyl]amino]-2-(tert-butoxycarbonylamino)-5-oxo-pentanoyl]amino]hexanoate (15.47 g, 21.02 mmol) in DCM (105 mL) is added TFA (16 mL, 210.2 mmol). The mixture is stirred at ambient temperature for 24 hours. After this time, additional TFA (16 mL, 210.2 mmol) is added and stirring is continued for an additional 2 hours. After this time, the mixture is concentrated in vacuo. The resulting residue is azeotroped with toluene (2×30 mL). The resulting oil is further dried in a vacuum oven at 40° C. for 4 hours to give the title compound (28.08 g, 58% purity accounting for residual toluene, 99+%). ES/MS m/z 436.40 (M+H). The compound is dissolved in 70 mL DMF to make a 0.3M solution that is used in the next step.

### Preparation 19

### Benzyl 6-[[(2S)-2-[5-[3-acetamido-4,5-diacetoxy-6-(acetoxymethyl)tetrahydropyran-2-yl]oxypentanoylamino]-5-[bis[2-[5-[3-acetamido-4,5-diacetoxy-6-(acetoxymethyl)tetrahydropyran-2-yl]oxypentanoylamino]ethyl]amino]-5-oxo-pentanoyl]amino]hexanoate

[chemical structure]

[0145] The title compound is prepared from 5-[3-acetamido-4,5-diacetoxy-6-(acetoxymethyl)tetrahydropyran-2-yl]oxypentanoic acid and benzyl 6-[[(2S)-2-amino-5-[bis(2-aminoethyl)amino]-5-oxo-pentanoyl]amino]hexanoate tris trifluoroacetic acid and in a manner essentially analogous to the method of preparation 10. ES/MS m/z 862 (M+2H)/2.

### Preparation 20

### 6-[[(2S)-2-[5-[3-Acetamido-4,5-diacetoxy-6-(acetoxymethyl)tetrahydropyran-2-yl]oxypentanoylamino]-5-[bis[2-[5-[3-acetamido-4,5-diacetoxy-6-(acetoxymethyl)tetrahydropyran-2-yl]oxypentanoylamino]ethyl]amino]-5-oxo-pentanoyl]amino]hexanoic acid

[chemical structure]

[0146] Palladium on carbon (1.90 g, 0.89 mmol, 5 mass %, 50% wet) is placed in a round-bottom flask and the vessel is evacuated and backfilled with nitrogen three times. A solution of benzyl 6-[[(2S)-2-[5-[3-acetamido-4,5-diacetoxy-6-(acetoxymethyl)tetrahydropyran-2-yl]oxypentanoylamino]-5-[bis[2-[5-[3-acetamido-4,5-diacetoxy-6-(acetoxymethyl)tetrahydropyran-2-yl]oxypentanoylamino]ethyl]amino]-5-oxo-pentanoyl]amino]hexanoate (15.41 g, 8.94 mmol) in MeOH (178 mL) is added via syringe. The flask is evacuated and backfilled with 1 atm hydrogen and the mixture is stirred at ambient temperature under 1 atm hydrogen for 18 hours. After this time, the mixture is filtered through diatomaceous earth and the filtrate is concentrated in vacuo to give the title compound (13.85 g, 95%). ES/MS m/z 817.2 (M+2H)/2.

### Preparation 21

### (2,5-Dioxopyrrolidin-1-yl) 6-[[(2S)-2-[5-[3-acetamido-4,5-diacetoxy-6-(acetoxymethyl)tetrahydropyran-2-yl]oxypentanoylamino]-5-[bis[2-[5-[3-acetamido-4,5-diacetoxy-6-(acetoxymethyl)tetrahydropyran-2-yl]oxypentanoylamino]ethyl]amino]-5-oxo-pentanoyl]amino]hexanoate

[chemical structure]

[0147] The title compound is prepared from 6-[[(2S)-2-[5-[3-acetamido-4,5-diacetoxy-6-(acetoxymethyl)tetrahydropyran-2-yl]oxypentanoylamino]-5-[bis[2-[5-[3-acetamido-4,5-diacetoxy-6-(acetoxymethyl)tetrahydropyran-2-yl]oxypentanoylamino]ethyl]amino]-5-oxo-pentanoyl]amino]hexanoic acid in a manner essentially analogous to the method of preparation 16. ES/MS m/z 866.20 (M+2H)/2.

### Preparation 22

### Benzyl (2S)-5-[bis[2-(tert-butoxycarbonylamino)ethyl]amino]-2-(tert-butoxycarbonylamino)-5-oxo-pentanoate

[chemical structure]

[0148] The title compound is prepared from tert-butyl N-[2-[2-(tert-butoxycarbonylamino)ethylamino]ethyl]carbamate and (4S)-5-benzyloxy-4-(tert-butoxycarbonylamino)-5-oxo-pentanoic acid in a manner essentially analogous to the method of preparation 12. ES/MS m/z 623.6 (M+H).

### Preparation 23

### Benzyl (2S)-2-amino-5-[bis(2-aminoethyl)amino]-5-oxo-pentanoate tris(trifluoroacetic acid) salt

[chemical structure]

[0149] The title compound is prepared from benzyl (2S)-5-[bis[2-(tert-butoxycarbonylamino)ethyl]amino]-2-(tert-butoxycarbonylamino)-5-oxo-pentanoate in a manner essentially analogous to the method of preparation 18. ES/MS m/z 323.2 (M+H).

### Preparation 24

### Benzyl (2S)-5-[bis[2-[5-(tert-butoxycarbonylamino)pentanoylamino]ethyl]amino]-2-[5-(tert-butoxycarbonylamino)pentanoylamino]-5-oxo-pentanoate

[chemical structure]

[0150] The title compound is prepared from 5-(tert-butoxycarbonylamino)pentanoic acid and benzyl (2S)-2-amino-5-[bis(2-aminoethyl)amino]-5-oxo-pentanoate tris(trifluoroacetic acid) salt in a manner essentially analogous to the method of preparation 10. ES/MS m/z 920.6 (M+H).

### Preparation 25

### Benzyl (2S)-2-(5-aminopentanoylamino)-5-[bis[2-(5-aminopentanoylamino)ethyl]amino]-5-oxo-pentanoate tris(trifluoroacetic acid) salt

[chemical structure]

[0151] The title compound is prepared from benzyl (2S)-5-[bis[2-[5-(tert-butoxycarbonylamino)pentanoylamino]ethyl]amino]-2-[5-(tert-butoxycarbonylamino)pentanoylamino]-5-oxo-pentanoate in a manner essentially analogous to the method of preparation 18. ES/MS m/z 620.4 (M+H).

### Preparation 26

### Benzyl (2S)-2-[5-[5-[3-acetamido-4,5-diacetoxy-6-(acetoxymethyl)tetrahydropyran-2-yl]oxypentanoylamino]pentanoylamino]-5-[bis[2-[5-[5-[3-acetamido-4,5-diacetoxy-6-(acetoxymethyl)tetrahydropyran-2-yl]oxypentanoylamino]pentanoylamino]ethyl]amino]-5-oxo-pentanoate

[chemical structure]

[0152] The title compound is prepared from 5-[3-acetamido-4,5-diacetoxy-6-(acetoxymethyl)tetrahydropyran-2-yl]oxypentanoic acid and benzyl (2S)-2-(5-aminopentanoylamino)-5-[bis[2-(5-aminopentanoylamino)ethyl]amino]-5-oxo-pentanoate tris(trifluoroacetic acid) salt and in a manner essentially analogous to the method of preparation 10. ES/MS m/z 954.80 (M+2H)/2.

### Preparation 27

### (2S)-2-[5-[5-[3-Acetamido-4,5-diacetoxy-6-(acetoxymethyl)tetrahydropyran-2-yl]oxypentanoylamino]pentanoylamino]-5-[bis[2-[5-[5-[3-acetamido-4,5-diacetoxy-6-(acetoxymethyl)tetrahydropyran-2-yl]oxypentanoylamino]pentanoylamino]ethyl]amino]-5-oxo-pentanoic acid

[chemical structure]

[0153] A round-bottom flask is charged with palladium on carbon (467 mg, 0.22 mmol, 5 mass %, 50% wet) and the flask is evacuated and backfilled with nitrogen three times. A solution of benzyl (2S)-2-[5-[5-[3-acetamido-4,5-diacetoxy-6-(acetoxymethyl)tetrahydropyran-2-yl]oxypentanoylamino]pentanoylamino]-5-[bis[2-[5-[5-[3-acetamido-4,5-diacetoxy-6-(acetoxymethyl)tetrahydropyran-2-yl]oxypentanoylamino]pentanoylamino]ethyl]amino]-5-oxo-pentanoate (4.19 g, 2.20 mmol) in MeOH (44 mL) is added via syringe followed by three drops of acetic acid. The flask is evacuated and backfilled with 1 atm hydrogen and the mixture is stirred at ambient temperature under 1 atm hydrogen. After 2 hours, the mixture is filtered through diatomaceous earth and the filtrate is concentrated in vacuo to give the title compound (3.99 g, 99+%). ES/MS m/z 909.6 (M+2H)/2.

### Preparation 28

### Benzyl 6-[[(2S)-2-[5-[5-[3-acetamido-4,5-diacetoxy-6-(acetoxymethyl)tetrahydropyran-2-yl]oxypentanoylamino]pentanoylamino]-5-[bis[2-[5-[5-[3-acetamido-4,5-diacetoxy-6-(acetoxymethyl)tetrahydropyran-2-yl]oxypentanoylamino]pentanoylamino]ethyl]amino]-5-oxo-pentanoyl]amino]hexanoate

[chemical structure]

[0154] The title compound is prepared from (2S)-2-[5-[5-[3-acetamido-4,5-diacetoxy-6-(acetoxymethyl)tetrahydropyran-2-yl]oxypentanoylamino]pentanoylamino]-5-[bis[2-[5-[5-[3-acetamido-4,5-diacetoxy-6-(acetoxymethyl)tetrahydropyran-2-yl]oxypentanoylamino]pentanoylamino]ethyl]amino]-5-oxo-pentanoic acid and benzyl 6-aminohexanoate hydrochloride and in a manner essentially analogous to the method of preparation 10. ES/MS m/z 1011.6 (M+2H)/2.

### Preparation 29

### 6-[[(2S)-2-[5-[5-[3-Acetamido-4,5-diacetoxy-6-(acetoxymethyl)tetrahydropyran-2-yl]oxypentanoylamino]pentanoylamino]-5-[bis[2-[5-[5-[3-acetamido-4,5-diacetoxy-6-(acetoxymethyl)tetrahydropyran-2-yl]oxypentanoylamino]pentanoylamino]ethyl]amino]-5-oxo-pentanoyl]amino]hexanoic acid

[chemical structure]

[0155] A round-bottom flask is charged with palladium on carbon (24 mg, 0.01 mmol, 5% by mass, 50% wet) and the flask is evacuated and backfilled with nitrogen. A solution of benzyl 6-[[(2S)-2-[5-[5-[3-acetamido-4,5-diacetoxy-6-(acetoxymethyl)tetrahydropyran-2-yl]oxypentanoylamino]pentanoylamino]-5-[bis[2-[5-[5-[3-acetamido-4,5-diacetoxy-6-(acetoxymethyl)tetrahydropyran-2-yl]oxypentanoylamino]pentanoylamino]ethyl]amino]-5-oxo-pentanoyl]amino]hexanoate (222 mg, 0.11 mmol) in MeOH (2.2 mL) is added via syringe followed by three drops of acetic acid. The flask is evacuated and backfilled with 1 atm hydrogen and the mixture is stirred under 1 atm hydrogen at ambient temperature. After 5 hours, the flask is purged with nitrogen and the mixture is filtered through diatomaceous earth. The filtrate is concentrated in vacuo to give the title compound (180 mg, 85%). ES/MS m/z 966.2 (M+2H)/2.

### Preparation 30

### (2,5-Dioxopyrrolidin-1-yl) 6-[[(2S)-2-[5-[5-[3-acetamido-4,5-diacetoxy-6-(acetoxymethyl)tetrahydropyran-2-yl]oxypentanoylamino]pentanoylamino]-5-[bis[2-[5-[5-[3-acetamido-4,5-diacetoxy-6-(acetoxymethyl)tetrahydropyran-2-yl]oxypentanoylamino]pentanoylamino]ethyl]amino]-5-oxo-pentanoyl]amino]hexanoate

[chemical structure]

[0156] The title compound is prepared from 6-[[(2S)-2-[5-[5-[3-acetamido-4,5-diacetoxy-6-(acetoxymethyl)tetrahydropyran-2-yl]oxypentanoylamino]pentanoylamino]-5-[bis[2-[5-[5-[3-acetamido-4,5-diacetoxy-6-(acetoxymethyl)tetrahydropyran-2-yl]oxypentanoylamino]pentanoylamino]ethyl]amino]-5-oxo-pentanoyl]amino]hexanoic acid in a manner essentially analogous to the method of preparation 16. ES/MS m/z 1014.6 (M+2H)/2.

### Preparation 31

### Benzyl 11-[[(2S)-2-[5-[5-[3-acetamido-4,5-diacetoxy-6-(acetoxymethyl)tetrahydropyran-2-yl]oxypentanoylamino]pentanoylamino]-5-[bis[2-[5-[5-[3-acetamido-4,5-diacetoxy-6-(acetoxymethyl)tetrahydropyran-2-yl]oxypentanoylamino]pentanoylamino]ethyl]amino]-5-oxo-pentanoyl]amino]undecanoate

[chemical structure]

[0157] The title compound is prepared from (2S)-2-[5-[5-[3-acetamido-4,5-diacetoxy-6-(acetoxymethyl)tetrahydropyran-2-yl]oxypentanoylamino]pentanoylamino]-5-[bis[2-[5-[5-[3-acetamido-4,5-diacetoxy-6-(acetoxymethyl)tetrahydropyran-2-yl]oxypentanoylamino]pentanoylamino]ethyl]amino]-5-oxo-pentanoic acid and benzyl 11-aminoudecanoate hydrochloride in a manner essentially analogous to the method of preparation 10. ES/MS m/z 1046.6 (M+2H)/2.

### Preparation 32

### 11-[[(2S)-2-[5-[5-[3-Acetamido-4,5-diacetoxy-6-(acetoxymethyl)tetrahydropyran-2-yl]oxypentanoylamino]pentanoylamino]-5-[bis[2-[5-[5-[3-acetamido-4,5-diacetoxy-6-(acetoxymethyl)tetrahydropyran-2-yl]oxypentanoylamino]pentanoylamino]ethyl]amino]-5-oxo-pentanoyl]amino]undecanoic acid

[chemical structure]

[0158] To a round-bottom flask is added palladium on carbon (35 mg, 0.02 mmol, 5 mass %, 50% wet) and the flask is evacuated and backfilled with nitrogen three times. A solution of benzyl 11-[[(2S)-2-[5-[5-[3-acetamido-4,5-diacetoxy-6-(acetoxymethyl)tetrahydropyran-2-yl]oxypentanoylamino]pentanoylamino]-5-[bis[2-[5-[5-[3-acetamido-4,5-diacetoxy-6-(acetoxymethyl)tetrahydropyran-2-yl]oxypentanoylamino]pentanoylamino]ethyl]amino]-5-oxo-pentanoyl]amino]undecanoate (285 mg, 80% purity, 0.11 mmol) is added via syringe. The vessel is evacuated and backfilled with 1 atm hydrogen and the mixture is then stirred at ambient temperature under 1 atm hydrogen. After stirring for 3 hours, the flask is purged with nitrogen and the mixture is filtered through diatomaceous earth. The filtrate is concentrated to give the title compound (213 mg, 79% purity, 77%). ES/MS m/z 1001.20 (M+2H)/2.

### Preparation 33

### (2,5-Dioxopyrrolidin-1-yl) 11-[[(2S)-2-[5-[5-[3-acetamido-4,5-diacetoxy-6-(acetoxymethyl)tetrahydropyran-2-yl]oxypentanoylamino]pentanoylamino]-5-[bis[2-[5-[5-[3-acetamido-4,5-diacetoxy-6-(acetoxymethyl)tetrahydropyran-2-yl]oxypentanoylamino]pentanoylamino]ethyl]amino]-5-oxo-pentanoyl]amino]undecanoate

[chemical structure]

[0159] The title compound is prepared from 11-[[(2S)-2-[5-[5-[3-acetamido-4,5-diacetoxy-6-(acetoxymethyl)tetrahydropyran-2-yl]oxypentanoylamino]pentanoylamino]-5-[bis[2-[5-[5-[3-acetamido-4,5-diacetoxy-6-(acetoxymethyl)tetrahydropyran-2-yl]oxypentanoylamino]pentanoylamino]ethyl]amino]-5-oxo-pentanoyl]amino]undecanoic acid in a manner essentially analogous to the method of preparation 16. ES/MS m/z 1050 (M+2H)/2

### Preparation 34

### [5-Acetamido-6-[5-[2-[[(4S)-4-[5-[3-acetamido-4,5-diacetoxy-6-(acetoxymethyl)tetrahydropyran-2-yl]oxypentanoylamino]-5-[[6-[[(1S)-1-[[bis(4-methoxyphenyl)-phenyl-methoxy]methyl]-2-[4-(hydroxymethyl)-1-piperidyl]-2-oxo-ethyl]amino]-6-oxo-hexyl]amino]-5-oxo-pentanoyl]-[2-[5-[3-acetamido-4,5-diacetoxy-6-(acetoxymethyl)tetrahydropyran-2-yl]oxypentanoylamino]ethyl]amino]ethylamino]-5-oxo-pentoxy]-3,4-diacetoxy-tetrahydropyran-2-yl]methyl acetate

[chemical structure]

[0160] The title compound is prepared from 6-[[(2S)-2-[5-[3-acetamido-4,5-diacetoxy-6-(acetoxymethyl)tetrahydropyran-2-yl]oxypentanoylamino]-5-[bis[2-[5-[3-acetamido-4,5-diacetoxy-6-(acetoxymethyl)tetrahydropyran-2-yl]oxypentanoylamino]ethyl]amino]-5-oxo-pentanoyl]amino]hexanoic acid and (2S)-2-amino-3-[bis(4-methoxyphenyl)-phenyl-methoxy]-1-[4-(hydroxymethyl)-1-piperidyl]propan-1-one in a manner essentially analogous to the method of preparation 10. ES/MS m/z 1059.2 (M−2H)/2.

### Preparation 35

### 4-[[1-[(2S)-2-[6-[[(2S)-2-[5-[3-Acetamido-4,5-diacetoxy-6-(acetoxymethyl)tetrahydropyran-2-yl]oxypentanoylamino]-5-[bis[2-[5-[3-acetamido-4,5-diacetoxy-6-(acetoxymethyl)tetrahydropyran-2-yl]oxypentanoylamino]ethyl]amino]-5-oxo-pentanoyl]amino]hexanoylamino]-3-[bis(4-methoxyphenyl)-phenyl-methoxy]propanoyl]-4-piperidyl]methoxy]-4-oxo-butanoic acid

[chemical structure]

[0161] To a solution of [5-acetamido-6-[5-[2-[[(4S)-4-[5-[3-acetamido-4,5-diacetoxy-6-(acetoxymethyl)tetrahydropyran-2-yl]oxypentanoylamino]-5-[[6-[[(1S)-1-[[bis(4-methoxyphenyl)-phenyl-methoxy]methyl]-2-[4-(hydroxymethyl)-1-piperidyl]-2-oxo-ethyl]amino]-6-oxo-hexyl]amino]-5-oxo-pentanoyl]-[2-[5-[3-acetamido-4,5-diacetoxy-6-(acetoxymethyl)tetrahydropyran-2-yl]oxypentanoylamino]ethyl]amino]ethylamino]-5-oxo-pentoxy]-3,4-diacetoxy-tetrahydropyran-2-yl]methyl acetate (1.194 g, 0.56 mmol) in DCM (11 mL) is added succinic anhydride (113 mg, 1.13 mmol), TEA (0.4 mL, 3 mmol) and DMAP (213 mg, 1.69 mmol). The mixture is stirred at ambient temperature for 1 hour. After this time, the mixture is diluted with saturated NH4Cl (200 mL) and extracted with DCM (3×200 mL) and 3:1 CHCl3:IPA (200 mL). The organic layers are combined, dried over sodium sulfate, filtered, and concentrated in vacuo. The resulting residue is purified by silica gel flash chromatography eluting with 0-40% MeOH/DCM and the resulting product is dried in a vacuum oven at 40° C. for 3 hours to give the title compound (1.081 g, 86%). ES/MS m/z 1109.60 (M−2H)/2.

### Preparation 36

### Resin Loading

[chemical structure]

[0162] A solution of 4-[[1-[(2S)-2-[6-[[(2S)-2-[5-[3-acetamido-4,5-diacetoxy-6-(acetoxymethyl)tetrahydropyran-2-yl]oxypentanoylamino]-5-[bis[2-[5-[3-acetamido-4,5-diacetoxy-6-(acetoxymethyl)tetrahydropyran-2-yl]oxypentanoylamino]ethyl]amino]-5-oxo-pentanoyl]amino]hexanoylamino]-3-[bis(4-methoxyphenyl)-phenyl-methoxy]propanoyl]-4-piperidyl]methoxy]-4-oxo-butanoic acid (1.00 g, 0.61 mmol) in MeCN (6 mL) and DCM (1 mL) is transferred to a resin loading cartridge. To the vessel are added 2-(1H-benzotriazol-1-yl)-1,1,3,3-tetramethyluronium hexafluorophosphate (386 mg, 0.97 mmol) and DIEA (0.25 mL, 0.48 mmol) and the cartridge is shaken at ambient temperature for 5 minutes. After this time, 1000 Å LCAA controlled-pore glass resin (5.39 g, 90 μmol/g loading, purchased from ChemGenes) is added and the mixture is shaken at ambient temperature for 18 hours. After this time, the cartridge is drained by suction and the resin is washed by shaking with DCM (10 mL) for 10 minutes. The cartridge is drained and the washing and draining procedure is repeated with 10% MeOH/DCM (10 mL) and Et2O (10 mL). After draining, a solution of acetic anhydride (6.4 mL), pyridine (20 mL) and TEA (0.22 mL) is added and the cartridge is shaken for 2 hours. After this time, the cartridge is drained and the washing and draining procedure above is repeated using DCM (10 mL), 10% MeOH/DCM (10 mL) and diethyl ether (10 mL). After draining, the resin is dried under vacuum for 30 minutes. The resin loading is determined using a standard trityl assay. The resin loading was calculated to be 34.7 μmol/g.

### Preparation 37

### Benzyl 2-[2-[[(2S)-2-[5-[5-[3-acetamido-4,5-diacetoxy-6-(acetoxymethyl)tetrahydropyran-2-yl]oxypentanoylamino]pentanoylamino]-5-[bis[2-[5-[5-[3-acetamido-4,5-diacetoxy-6-(acetoxymethyl)tetrahydropyran-2-yl]oxypentanoylamino]pentanoylamino]ethyl]amino]-5-oxo-pentanoyl]amino]ethoxy]acetate

[chemical structure]

[0163] The title compound is prepared from (2S)-2-[5-[5-[3-Acetamido-4,5-diacetoxy-6-(acetoxymethyl)tetrahydropyran-2-yl]oxypentanoylamino]pentanoylamino]-5-[bis[2-[5-[5-[3-acetamido-4,5-diacetoxy-6-(acetoxymethyl)tetrahydropyran-2-yl]oxypentanoylamino]pentanoylamino]ethyl]amino]-5-oxo-pentanoic acid and benzyl 2-(2-aminoethoxy)acetate hydrochloride in a manner essentially analogous to the method of preparation 10. ES/MS m/z 1005.2 (M+2H/2).

### Preparation 38

### 2-[2-[[(2S)-2-[5-[5-[3-Acetamido-4,5-diacetoxy-6-(acetoxymethyl)tetrahydropyran-2-yl]oxypentanoylamino]pentanoylamino]-5-[bis[2-[5-[5-[3-acetamido-4,5-diacetoxy-6-(acetoxymethyl)tetrahydropyran-2-yl]oxypentanoylamino]pentanoylamino]ethyl]amino]-5-oxo-pentanoyl]amino]ethoxy]acetic acid

[chemical structure]

[0164] Benzyl 2-[2-[[(2S)-2-[5-[5-[3-acetamido-4,5-diacetoxy-6-(acetoxymethyl)tetrahydropyran-2-yl]oxypentanoylamino]pentanoylamino]-5-[bis[2-[5-[5-[3-acetamido-4,5-diacetoxy-6-(acetoxymethyl)tetrahydropyran-2-yl]oxypentanoylamino]pentanoylamino]ethyl]amino]-5-oxo-pentanoyl]amino]ethoxy]acetate (0.120 mmol, 240 mg) is combined with 5% Pd/C (1.17 mmol, 124 mg) in MeOH (12.0 ml). The mixture is hydrogenated on a Parr shaker (ambient temperature, 10 psi) for 48 minutes, filtered through diatomaceous earth, and concentrated in vacuo to give the title compound as a gray solid (187 mg, 82%). ES/MS m/z 960.0 (M+2H/2).

### Preparation 39

### (2,3,5,6-Tetrafluorophenyl) 2-[2-[[(2S)-2-[5-[5-[3-acetamido-4,5-diacetoxy-6-(acetoxymethyl)tetrahydropyran-2-yl]oxypentanoylamino]pentanoylamino]-5-[bis[2-[5-[5-[3-acetamido-4,5-diacetoxy-6-(acetoxymethyl)tetrahydropyran-2-yl]oxypentanoylamino]pentanoylamino]ethyl]amino]-5-oxo-pentanoyl]amino]ethoxy]acetate

[chemical structure]

[0165] To 2-[2-[[(2S)-2-[5-[5-[3-acetamido-4,5-diacetoxy-6-(acetoxymethyl)tetrahydropyran-2-yl]oxypentanoylamino]pentanoylamino]-5-[bis[2-[5-[5-[3-acetamido-4,5-diacetoxy-6-(acetoxymethyl)tetrahydropyran-2-yl]oxypentanoylamino]pentanoylamino]ethyl]amino]-5-oxo-pentanoyl]amino]ethoxy]acetic acid (0.096 mmol, 184 mg) and DIEA (0.765 mmol, 140 μL) in DCM (3.0 ml) is added (2,3,5,6-tetrafluorophenyl) 2,2,2-trifluoroacetate (0.383 mmol, 100 mg) to the mixture dropwise. The mixture is stirred at ambient temperature for 16 hours. The reaction mixture is purified directly by silica gel flash chromatography eluting with 0% to 50% MeOH/DCM to give the title compound as a tan solid (197 mg, 99%). ES/MS m/z 1034.0 (M+2H/2).

### Preparation 40

### Benzyl 2-[2-[2-[2-[[(2S)-2-[5-[5-[3-acetamido-4,5-diacetoxy-6-(acetoxymethyl)tetrahydropyran-2-yl]oxypentanoylamino]pentanoylamino]-5-[bis[2-[5-[5-[3-acetamido-4,5-diacetoxy-6-(acetoxymethyl)tetrahydropyran-2-yl]oxypentanoylamino]pentanoylamino]ethyl]amino]-5-oxo-pentanoyl]amino]ethoxy]ethoxy]ethoxy]acetate

[chemical structure]

[0166] The title compound is prepared from (2S)-2-[5-[5-[3-acetamido-4,5-diacetoxy-6-(acetoxymethyl)tetrahydropyran-2-yl]oxypentanoylamino]pentanoylamino]-5-[bis[2-[5-[5-[3-acetamido-4,5-diacetoxy-6-(acetoxymethyl)tetrahydropyran-2-yl]oxypentanoylamino]pentanoylamino]ethyl]amino]-5-oxo-pentanoic acid and benzyl 2-[2-[2-(2-aminoethoxy)ethoxy]ethoxy]acetate hydrochloride in a manner essentially analogous to the method of preparation 10. ES/MS m/z 1049.0 (M+2H/2).

### Preparation 41

### 2-[2-[2-[2-[[(2S)-2-[5-[5-[3-Acetamido-4,5-diacetoxy-6-(acetoxymethyl)tetrahydropyran-2-yl]oxypentanoylamino]pentanoylamino]-5-[bis[2-[5-[5-[3-acetamido-4,5-diacetoxy-6-(acetoxymethyl)tetrahydropyran-2-yl]oxypentanoylamino]pentanoylamino]ethyl]amino]-5-oxo-pentanoyl]amino]ethoxy]ethoxy]ethoxy]acetic acid

[chemical structure]

[0167] Benzyl 2-[2-[2-[2-[[(2S)-2-[5-[5-[3-acetamido-4,5-diacetoxy-6-(acetoxymethyl)tetrahydropyran-2-yl]oxypentanoylamino]pentanoylamino]-5-[bis[2-[5-[5-[3-acetamido-4,5-diacetoxy-6-(acetoxymethyl)tetrahydropyran-2-yl]oxypentanoylamino]pentanoylamino]ethyl]amino]-5-oxo-pentanoyl]amino]ethoxy]ethoxy]ethoxy]acetate (0.118 mmol, 247 mg) is combined with 5% Pd/C (1.17 mmol, 124 mg) in MeOH (12.0 mL). The mixture is hydrogenated on a Parr shaker (ambient temperature, 10 psi) for 1 hour, filtered through diatomaceous earth, and concentrated in vacuo to give the title compound as a gray solid (227 mg, 96%). ES/MS m/z 1004.0 (M+2H/2).

### Preparation 42

### (2,3,5,6-Tetrafluorophenyl) 2-[2-[2-[2-[[(2S)-2-[5-[5-[3-acetamido-4,5-diacetoxy-6-(acetoxymethyl)tetrahydropyran-2-yl]oxypentanoylamino]pentanoylamino]-5-[bis[2-[5-[5-[3-acetamido-4,5-diacetoxy-6-(acetoxymethyl)tetrahydropyran-2-yl]oxypentanoylamino]pentanoylamino]ethyl]amino]-5-oxo-pentanoyl]amino]ethoxy]ethoxy]ethoxy]acetate

[chemical structure]

[0168] To 2-[2-[2-[2-[[(2S)-2-[5-[5-[3-Acetamido-4,5-diacetoxy-6-(acetoxymethyl)tetrahydropyran-2-yl]oxypentanoylamino]pentanoylamino]-5-[bis[2-[5-[5-[3-acetamido-4,5-diacetoxy-6-(acetoxymethyl)tetrahydropyran-2-yl]oxypentanoylamino]pentanoylamino]ethyl]amino]-5-oxo-pentanoyl]amino]ethoxy]ethoxy]ethoxy]acetic acid (0.111 mmol, 222 mg) and DIEA (0.883 mmol, 154 μL) in DCM (3.0 ml) is added (2,3,5,6-tetrafluorophenyl) 2,2,2-trifluoroacetate (0.443 mmol, 116 mg) to the mixture dropwise. The mixture is stirred at ambient temperature for 16 hours. The reaction mixture is purified directly by silica gel flash chromatography eluting with 0% to 50% MeOH/DCM to give the title compound as a tan solid (174 mg, 73%). ES/MS m/z 1078.2 (M+2H/2).

### Example 1: Conjugation Protocol

[0169] For the synthesis of GalNAc-conjugated sense strands, a sense strand with a 3′ C6-NH2 functional group was first synthesized using standard phosphoramidite chemistry. A stock solution of GalNAc ligand-NHS ester (10 mmol/L in acetonitrile; 1 eq) was prepared. Borate buffer (10% v/v; 20×) was added to oligonucleotide C6-NH2 sense strand in an Eppendorf tube, then GalNAc ligand (5 eq) was added. The mixture was shaken at ambient temperature for 16 hours. After this time, the mixture was transferred to a 15 mL falcon tube, ammonium hydroxide (28 mass %) was added, and the mixture was shaken at ambient temperature for 2 hours. The ammonia was then removed in vacuo. The residue was purified by ion-exchange chromatography. Conditions: Solvent A: 15% MeCN/20 mM NaH2PO4, Solvent B: 15% MeCN/20 mM NaH2PO4, 1M NaBr; 35-55% B over 5 CV at 8 mL/min, column temperature 60° C. The desired fractions were pooled and desalted by spin-filtration using an Eppendorf centrifuge or desalting column. After desalting, the material was recovered and OD and volume were measured to obtain concentration.

[0170] Alternatively, conjugation was to the 5′ position of the sense strand through immobilizing the GalNAc ligand on microporous polystyrene resin or controlled pore glass and synthesizing using established solid phase oligonucleotide synthesis methods with 5′-CE β-cyanoethyl) phosphoramidites.

[0171] Alternatively, the GalNAc ligand was converted to a suitable phosphoramidite and delivered to the 5′ position of the sense strand using standard phosphoramidite chemistry.

### Example 2: Annealing

[0172] To generate the siRNA duplexes of a sense and antisense strand, the following procedures were performed. To a falcon tube containing oligonucleotide sense strand-GalNAc conjugate, the corresponding antisense oligonucleotide (1 eq) was added and vortexed for 10 seconds before spin-filtering through 100K MWCO Amicon filter unit to remove particulates. The filtrate was recovered and concentrated in vacuo on a Genevac evaporator. The residue was reconstituted in 1×PBS, filtered through 0.2μ filter, and OD and volume were measured to obtain concentration.

[0173] An endotoxin test was performed using a Limulus amebocyte lysate on an Endosafe®-nexgen PTS instrument.

TABLE 1
Exemplary molecules synthesized ustilizing the aforementioned conjugation
and annealing protocols.

| Molecule | |
|---|---|
| Identifier | Ligand attached to 3′ of sense strand |
| 1 | [chemical structure] |
| 2 | [chemical structure] |
| 3 | [chemical structure] |
| 4 | [chemical structure] |
| 5 | [chemical structure] |
| 6 | [chemical structure] |

### Example 3

### General Procedure for Oligo Synthesis Using GalNAc-Functionalized CPG

[0174] Oligo synthesis was conducted on a MerMade™ 12 instrument using phosphoramidite chemistry. Sense strands were synthesized from the prefunctionalized GalNAc solid support and antisense strands were synthesized using standard support preloaded with the first nucleotide of the oligo sequence. Oligos were cleaved and deprotected using concentrated ammonium hydroxide solution (28% by mass) and purified by ion exchange chromatography using conditions described above. Desalting, annealing, and endotoxin testing were conducted.

[0175] The sequence of antisense oligonucleotides were designed using 15 to 50 nucleotides of the following FAS transcript (SEQ ID NO: 1), where T nucleotides were replaced by U nucleotides, and where one or more nucleotides and one or more internucleotide linkages were optionally further modified as described herein.

Homo sapiens FAS Cell Death Receptor (FAS) Transcript,

| SEQ ID NO: 1 | |
|---|---|
| 1 | ctcttctccc gcgggttggt ggacccgctc agtacggagt tggggaagct ctttcacttc |
| 61 | ggaggattgc tcaacaacca tgctgggcat ctggaccctc ctacctctgg ttcttacgtc |
| 121 | tgttgctaga ttatcgtcca aaagtgttaa tgcccaagtg actgacatca actccaaggg |
| 181 | attggaattg aggaagactg ttactacagt tgagactcag aacttggaag gcctgcatca |
| 241 | tgatggccaa ttctgccata agccctgtcc tccaggtgaa aggaaagcta gggactgcac |
| 301 | agtcaatggg gatgaaccag actgcgtgcc ctgccaagaa gggaaggagt acacagacaa |
| 361 | agcccatttt tcttccaaat gcagaagatg tagattgtgt gatgaaggac atggcttaga |
| 421 | agtggaaata aactgcaccc ggacccagaa taccaagtgc agatgtaaac caaacttttt |
| 481 | ttgtaactct actgtatgtg aacactgtga cccttgcacc aaatgtgaac atggaatcat |
| 541 | caaggaatgc acactcacca gcaacaccaa gtgcaaagag gaaggatcca gatctaactt |
| 601 | ggggtggctt tgtcttcttc ttttgccaat tccactaatt gtttgggtga agagaaagga |
| 661 | agtacagaaa acatgcagaa agcacagaaa ggaaaaccaa ggttctcatg aatctccaac |
| 721 | tttaaatcct gaaacagtgg caataaattt atctgatgtt gacttgagta aatatatcac |
| 781 | cactattgct ggagtcatga cactaagtca agttaaaggc tttgttcgaa agaatggtgt |
| 841 | caatgaagcc aaaatagatg agatcaagaa tgacaatgtc caagacacag cagaacagaa |
| 901 | agttcaactg cttcgtaatt ggcatcaact tcatggaaag aaagaagcgt atgacacatt |
| 961 | gattaaagat ctcaaaaaag ccaatctttg tactcttgca gagaaaattc agactatcat |
| 1021 | cctcaaggac attactagtg actcagaaaa ttcaaacttc agaaatgaaa tccaaagctt |
| 1081 | ggtctagagt gaaaaacaac aaattcagtt ctgagtatat gcaattagtg tttgaaaaga |
| 1141 | ttcttaatag ctggctgtaa atactgcttg gttttttact gggtacattt tatcatttat |
| 1201 | tagcgctgaa gagccaacat atttgtagat ttttaatatc tcatgattct gcctccaagg |
| 1261 | atgtttaaaa tctagttggg aaaacaaact tcatcaagag taaatgcagt ggcatgctaa |
| 1321 | gtacccaaat aggagtgtat gcagaggatg aaagattaag attatgctct ggcatctaac |
| 1381 | atatgattct gtagtatgaa tgtaatcagt gtatgttagt acaaatgtct atccacaggc |
| 1441 | taaccccact ctatgaatca atagaagaag ctatgacctt ttgctgaaat atcagttact |
| 1501 | gaacaggcag gccactttgc ctctaaatta cctctgataa ttctagagat tttaccatat |
| 1561 | ttctaaactt tgtttataac tctgagaaga tcatatttat gtaaagtata tgtatttgag |
| 1621 | tgcagaattt aaataaggct ctacctcaaa gacctttgca cagtttattg gtgtcatatt |
| 1681 | atacaatatt tcaattgtga attcacatag aaaacattaa attataatgt ttgactatta |
| 1741 | tatatgtgta tgcattttac tggctcaaaa ctacctactt ctttctcagg catcaaaagc |
| 1801 | attttgagca ggagagtatt actagagctt tgccacctct ccatttttgc cttggtgctc |
| 1861 | atcttaatgg cctaatgcac ccccaaacat ggaaatatca ccaaaaaata cttaatagtc |
| 1921 | caccaaaagg caagactgcc cttagaaatt ctagcctggt ttggagatac taactgctct |
| 1981 | cagagaaagt agctttgtga catgtcatga acccatgttt gcaatcaaag atgataaaat |
| 2041 | agattcttat ttttccccca cccccgaaaa tgttcaataa tgtcccatgt aaaacctgct |
| 2101 | acaaatggca gcttatacat agcaatggta aaatcatcat ctggatttag gaattgctct |
| 2161 | tgtcataccc ccaagtttct aagatttaag attctcctta ctactatcct acgtttaaat |
| 2221 | atctttgaaa gtttgtatta aatgtgaatt ttaagaaata atatttatat ttctgtaaat |
| 2281 | gtaaactgtg aagatagtta taaactgaag cagatacctg gaaccaccta aagaacttcc |
| 2341 | atttatggag gatttttttg ccccttgtgt ttggaattat aaaatatagg taaaagtacg |
| 2401 | taattaaata atgtttttgg tatttctggt tttctctttt ttggtagggg cttgcttttt |
| 2461 | ggttttgtct tccttttctc taactgatgc taaatataac ttgtctttaa tgcttcttgg |
| 2521 | atcccttaga aggtacttcc tttttaacct taaccctttt agtagttaaa taattatttc |
| 2581 | cataggttgc tattgccaag aagacctctt ccaaacagca catgattatt cgtcaaacag |
| 2641 | tttcgtattc cagatactgg aatgtggata agaaagtata catttcaagg ggtaggtttt |
| 2701 | attattaaga aagccaaatg aggattttga aatattcttt cctgcatatt atccattcta |
| 2761 | gctacatgct ggccagtggg ccacctttct tttctgcaat ttaatgctag taatatattc |
| 2821 | tatttaaccc atgagtccca aagtattagc atttcaacat gtaagcatgt cggtaagata |
| 2881 | gttgtgcttt gcttagggtt ccctcctgtg ttatggtctg gaaagtgtct ttaggcagaa |
| 2941 | agtctgagtg atcacagggt tcactcatta atttctcttt tctgagccat catagtctgt |
| 3001 | gctgtctgct ctccagtttt ctatttctag acagaagtag ggcaagttag gtactagtta |
| 3061 | ttcttcatgg ccagaagtgc aagttctact ttgcaagaca agattaagtt agagaacacc |
| 3121 | ctattccact ttggtgaact cagagcaaga actttgagtt cctttgggag gaagacagtg |
| 3181 | gagaagtctt tgtacttggt gatgtggttt ttttcctcat ggcttcacct agtggcccca |
| 3241 | agcatgactt ctcccatgtc aatgagcaca gccacattcc cgagttgagg tgaccccacg |
| 3301 | gtccagaatc atcctcattc tggtgaacct ggttctcttt gtggtgggca tactgggtag |
| 3361 | gagaatcacc caaaggtcac ccatgagctg cagaaaaaaa ggctatttgc agaaggagct |
| 3421 | cacagatcac attgaaagca ttgcatattc aaacatcttg gtcttcttta ttggcatgcc |
| 3481 | cacagggtct tctgacctct gattagatca gacacttttt agatattgaa tcatcagttt |
| 3541 | ctgtacaact atctgaataa ggtatataat caatgaaatt tagaattttt ttctatgctt |
| 3601 | actcctgatt ggtaatttgt ttgggtttag aattctatac aaggccattt gtaattttcc |
| 3661 | tcagcacttt aaaaatatta aaccatgttt tcttaa |

[0176] Exemplary antisense strand sequences of 18 nucleotides in length are shown in Table 2 below, which may be optionally further modified and synthesized and incorporated into the RNAi agents, as described herein.

TABLE 2
Antisense 18 mers of FAS RNAi agents

| | AntiSense 18mer |
|---|---|
| SEQ ID NO: | 5′ to 3′ |
| SEQ ID NO: 2 | UCUAAGCCAUGUCCUUCA |
| SEQ ID NO: 3 | UACAAAAAAAGUUUGGUU |
| SEQ ID NO: 4 | AUCACACAAUCUACAUCU |
| SEQ ID NO: 5 | AUAUAUUUACUCAAGUCA |
| SEQ ID NO: 6 | UGGACAUUGUCAUUCUUG |
| SEQ ID NO: 7 | UAUAUUUACUCAAGUCAA |
| SEQ ID NO: 8 | UUGAUCUCAUCUAUUUUG |
| SEQ ID NO: 9 | CAAUCUACAUCUUCUGCA |
| SEQ ID NO: 10 | ACCAUUCUUUCGAACAAA |
| SEQ ID NO: 11 | GUGAUAUAUUUACUCAAG |
| SEQ ID NO: 12 | UGUCAUUCUUGAUCUCAU |
| SEQ ID NO: 13 | GUGGUGAUAUAUUUACUC |
| SEQ ID NO: 14 | CAUUCUUGAUCUCAUCUA |
| SEQ ID NO: 15 | CACCAUUCUUUCGAACAA |
| SEQ ID NO: 16 | AAGCCAUGUCCUUCAUCA |
| SEQ ID NO: 17 | UGAUAUAUUUACUCAAGU |
| SEQ ID NO: 18 | UACGAAGCAGUUGAACUU |
| SEQ ID NO: 19 | ACACAAUCUACAUCUUCU |
| SEQ ID NO: 20 | CAAGGGUCACAGUGUUCA |
| SEQ ID NO: 21 | CUUUAACUUGACUUAGUG |
| SEQ ID NO: 22 | UACAUCUGCACUUGGUAU |
| SEQ ID NO: 23 | GCUGUGUCUUGGACAUUG |
| SEQ ID NO: 24 | UUCUAAGCCAUGUCCUUC |
| SEQ ID NO: 25 | UACAUCUUCUGCAUUUGG |
| SEQ ID NO: 26 | ACAUUGUCAUUCUUGAUC |
| SEQ ID NO: 27 | UUGGUUUACAUCUGCACU |
| SEQ ID NO: 28 | ACACCAUUCUUUCGAACA |
| SEQ ID NO: 29 | CACACAAUCUACAUCUUC |
| SEQ ID NO: 30 | UCUCUGCAAGAGUACAAA |
| SEQ ID NO: 31 | UUGGUGCAAGGGUCACAG |
| SEQ ID NO: 32 | CUACAUCUUCUGCAUUUG |
| SEQ ID NO: 33 | UCUGCUGUGUCUUGGACA |
| SEQ ID NO: 34 | GUACUCCUUCCCUUCUUG |
| SEQ ID NO: 35 | UGGUGAUAUAUUUACUCA |
| SEQ ID NO: 36 | GUCAUUCUUGAUCUCAUC |
| SEQ ID NO: 37 | GAUAUAUUUACUCAAGUC |
| SEQ ID NO: 38 | AUAGUGGUGAUAUAUUUA |
| SEQ ID NO: 39 | GUUUACAUCUGCACUUGG |
| SEQ ID NO: 40 | GUCACAGUGUUCACAUAC |
| SEQ ID NO: 41 | GGACAUUGUCAUUCUUGA |
| SEQ ID NO: 42 | UUAACUUGACUUAGUGUC |
| SEQ ID NO: 43 | AUUCUUGAUCUCAUCUAU |
| SEQ ID NO: 44 | GGGUCACAGUGUUCACAU |
| SEQ ID NO: 45 | UUACAUCUGCACUUGGUA |
| SEQ ID NO: 46 | CAUUGUCAUUCUUGAUCU |
| SEQ ID NO: 47 | UUCUCUGCAAGAGUACAA |
| SEQ ID NO: 48 | UCUCAUCUAUUUUGGCUU |
| SEQ ID NO: 49 | UAGUAAUGUCCUUGAGGA |
| SEQ ID NO: 50 | AGGGUCACAGUGUUCACA |
| SEQ ID NO: 51 | AGUCACUUGGGCAUUAAC |
| SEQ ID NO: 52 | CCAAUUACGAAGCAGUUG |
| SEQ ID NO: 53 | CACAAUCUACAUCUUCUG |
| SEQ ID NO: 54 | UAGUGGUGAUAUAUUUAC |
| SEQ ID NO: 55 | UGGUGAGUGUGCAUUCCU |
| SEQ ID NO: 56 | CCUAGCUUUCCUUUCACC |
| SEQ ID NO: 57 | GUGUCUUGGACAUUGUCA |
| SEQ ID NO: 58 | UGCUGGUGAGUGUGCAUU |
| SEQ ID NO: 59 | CCUUUCACCUGGAGGACA |
| SEQ ID NO: 60 | ACAAUCUACAUCUUCUGC |
| SEQ ID NO: 61 | CCAUGUCCUUCAUCACAC |
| SEQ ID NO: 62 | UUACGAAGCAGUUGAACU |
| SEQ ID NO: 63 | CAGUCACUUGGGCAUUAA |
| SEQ ID NO: 64 | UAUUUACUCAAGUCAACA |
| SEQ ID NO: 65 | AUCUCAUCUAUUUUGGCU |
| SEQ ID NO: 66 | CAAUUACGAAGCAGUUGA |
| SEQ ID NO: 67 | AAUUUUCUCUGCAAGAGU |
| SEQ ID NO: 68 | UCACUAGUAAUGUCCUUG |
| SEQ ID NO: 69 | UGUCUGUGUACUCCUUCC |
| SEQ ID NO: 70 | AACUUGACUUAGUGUCAU |
| SEQ ID NO: 71 | CACUAGUAAUGUCCUUGA |
| SEQ ID NO: 72 | CCAUUCUUUCGAACAAAG |
| SEQ ID NO: 73 | UGGCAGGGCACGCAGUCU |
| SEQ ID NO: 74 | UGAUCUCAUCUAUUUUGG |
| SEQ ID NO: 75 | CUGUGUACUCCUUCCCUU |
| SEQ ID NO: 76 | UGUCCUUCAUCACACAAU |
| SEQ ID NO: 77 | AGCAAUCCUCCGAAGUGA |
| SEQ ID NO: 78 | UGCAGUCCCUAGCUUUCC |
| SEQ ID NO: 79 | UUCCACUUCUAAGCCAUG |
| SEQ ID NO: 80 | AUUUUCUCUGCAAGAGUA |
| SEQ ID NO: 81 | GGGCACGCAGUCUGGUUC |
| SEQ ID NO: 82 | UAACUUGACUUAGUGUCA |
| SEQ ID NO: 83 | GACACCAUUCUUUCGAAC |
| SEQ ID NO: 84 | UGGUGCAAGGGUCACAGU |
| SEQ ID NO: 85 | UCCGGGUGCAGUUUAUUU |
| SEQ ID NO: 86 | UCACUUGGGCAUUAACAC |
| SEQ ID NO: 87 | AAUUACGAAGCAGUUGAA |
| SEQ ID NO: 88 | UUGAGCAAUCCUCCGAAG |
| SEQ ID NO: 89 | CUCAUCUAUUUUGGCUUC |
| SEQ ID NO: 90 | GUUGAGCAAUCCUCCGAA |
| SEQ ID NO: 91 | CCCUAGCUUUCCUUUCAC |
| SEQ ID NO: 92 | GUCUGUGUACUCCUUCCC |
| SEQ ID NO: 93 | GGGUGCAGUUUAUUUCCA |
| SEQ ID NO: 94 | UGUGUCUUGGACAUUGUC |
| SEQ ID NO: 95 | AUGUCCUUCAUCACACAA |
| SEQ ID NO: 96 | ACGCAGUCUGGUUCAUCC |
| SEQ ID NO: 97 | UCAGUCACUUGGGCAUUA |
| SEQ ID NO: 98 | GGCAGGGCACGCAGUCUG |
| SEQ ID NO: 99 | GGUGCAAGGGUCACAGUG |
| SEQ ID NO: 100 | UUUGUCUGUGUACUCCUU |
| SEQ ID NO: 101 | CACGCAGUCUGGUUCAUC |
| SEQ ID NO: 102 | CUUCUUGGCAGGGCACGC |
| SEQ ID NO: 103 | UGCAAGGGUCACAGUGUU |
| SEQ ID NO: 104 | CAUGGUUGUUGAGCAAUC |
| SEQ ID NO: 105 | UUUAACUUGACUUAGUGU |
| SEQ ID NO: 106 | AGUCCCUAGCUUUCCUUU |
| SEQ ID NO: 107 | UGCUGUGUCUUGGACAUU |
| SEQ ID NO: 108 | GUCCCUAGCUUUCCUUUC |
| SEQ ID NO: 109 | UCCUCCGAAGUGAAAGAG |
| SEQ ID NO: 110 | AUCUUCUGCAUUUGGAAG |
| SEQ ID NO: 111 | UGGUUGUUGAGCAAUCCU |
| SEQ ID NO: 112 | UACUCCUUCCCUUCUUGG |

TABLE 3A
Exemplary full-length sense and antisense strands of FAS RNAi agents

| | SEQ ID | | SEQ ID | |
|---|---|---|---|---|
| Duplex | NO: | Sense Strand | NO: | Antisense Strand |
| D: 1 | SEQ ID | GAUGAAGGACAUGGCUUAGAA | SEQ ID | UUCUAAGCCAUGUCCUUCAUCAC |
| | NO: | | NO: 224 | |
| | 113 | | | |
| D: 2 | SEQ ID | UAAACCAAACUUUUUUUGUAA | SEQ ID | UUACAAAAAAAGUUUGGUUUACA |
| | NO: | | NO: 225 | |
| | 114 | | | |
| D: 3 | SEQ ID | GAAGAUGUAGAUUGUGUGAUA | SEQ ID | UAUCACACAAUCUACAUCUUCUG |
| | NO: | | NO: 226 | |
| | 115 | | | |
| D: 4 | SEQ ID | GUUGACUUGAGUAAAUAUAUA | SEQ ID | UAUAUAUUUACUCAAGUCAACAU |
| | NO: | | NO: 227 | |
| | 116 | | | |
| D: 5 | SEQ ID | AUCAAGAAUGACAAUGUCCAA | SEQ ID | UUGGACAUUGUCAUUCUUGAUCU |
| | NO: | | NO: 228 | |
| | 117 | | | |
| D: 6 | SEQ ID | UGUUGACUUGAGUAAAUAUAA | SEQ ID | UUAUAUUUACUCAAGUCAACAUC |
| | NO: | | NO: 229 | |
| | 118 | | | |
| D: 7 | SEQ ID | GCCAAAAUAGAUGAGAUCAAA | SEQ ID | UUUGAUCUCAUCUAUUUUGGCUU |
| | NO: | | NO: 230 | |
| | 119 | | | |
| D: 8 | SEQ ID | AAUGCAGAAGAUGUAGAUUGA | SEQ ID | UCAAUCUACAUCUUCUGCAUUUG |
| | NO: | | NO: 231 | |
| | 120 | | | |
| D: 9 | SEQ ID | GCUUUGUUCGAAAGAAUGGUA | SEQ ID | UACCAUUCUUUCGAACAAAGCCU |
| | NO: | | NO: 232 | |
| | 121 | | | |
| D: 10 | SEQ ID | GACUUGAGUAAAUAUAUCACA | SEQ ID | UGUGAUAUAUUUACUCAAGUCAA |
| | NO: | | NO: 233 | |
| | 122 | | | |
| D: 11 | SEQ ID | AGAUGAGAUCAAGAAUGACAA | SEQ ID | UUGUCAUUCUUGAUCUCAUCUAU |
| | NO: | | NO: 234 | |
| | 123 | | | |
| D: 12 | SEQ ID | UUGAGUAAAUAUAUCACCACA | SEQ ID | UGUGGUGAUAUAUUUACUCAAGU |
| | NO: | | NO: 235 | |
| | 124 | | | |
| D: 13 | SEQ ID | AAUAGAUGAGAUCAAGAAUGA | SEQ ID | UCAUUCUUGAUCUCAUCUAUUUU |
| | NO: | | NO: 236 | |
| | 125 | | | |
| D: 14 | SEQ ID | CUUUGUUCGAAAGAAUGGUGA | SEQ ID | UCACCAUUCUUUCGAACAAAGCC |
| | NO: | | NO: 237 | |
| | 126 | | | |
| D: 15 | SEQ ID | UGUGAUGAAGGACAUGGCUUA | SEQ ID | UAAGCCAUGUCCUUCAUCACACA |
| | NO: | | NO: 238 | |
| | 127 | | | |
| D: 16 | SEQ ID | UGACUUGAGUAAAUAUAUCAA | SEQ ID | UUGAUAUAUUUACUCAAGUCAAC |
| | NO: | | NO: 239 | |
| | 128 | | | |
| D: 17 | SEQ ID | GAAAGUUCAACUGCUUCGUAA | SEQ ID | UUACGAAGCAGUUGAACUUUCUG |
| | NO: | | NO: 240 | |
| | 129 | | | |
| D: 18 | SEQ ID | GCAGAAGAUGUAGAUUGUGUA | SEQ ID | UACACAAUCUACAUCUUCUGCAU |
| | NO: | | NO: 241 | |
| | 130 | | | |
| D: 19 | SEQ ID | UGUGAACACUGUGACCCUUGA | SEQ ID | UCAAGGGUCACAGUGUUCACAUA |
| | NO: | | NO: 242 | |
| | 131 | | | |
| D: 20 | SEQ ID | GACACUAAGUCAAGUUAAAGA | SEQ ID | UCUUUAACUUGACUUAGUGUCAU |
| | NO: | | NO: 243 | |
| | 132 | | | |
| D: 21 | SEQ ID | GAAUACCAAGUGCAGAUGUAA | SEQ ID | UUACAUCUGCACUUGGUAUUCUG |
| | NO: | | NO: 244 | |
| | 133 | | | |
| D: 22 | SEQ ID | GACAAUGUCCAAGACACAGCA | SEQ ID | UGCUGUGUCUUGGACAUUGUCAU |
| | NO: | | NO: 245 | |
| | 134 | | | |
| D: 23 | SEQ ID | AUGAAGGACAUGGCUUAGAAA | SEQ ID | UUUCUAAGCCAUGUCCUUCAUCA |
| | NO: | | NO: 246 | |
| | 135 | | | |
| D: 24 | SEQ ID | UUCCAAAUGCAGAAGAUGUAA | SEQ ID | UUACAUCUUCUGCAUUUGGAAGA |
| | NO: | | NO: 247 | |
| | 136 | | | |
| D: 25 | SEQ ID | GAGAUCAAGAAUGACAAUGUA | SEQ ID | UACAUUGUCAUUCUUGAUCUCAU |
| | NO: | | NO: 248 | |
| | 137 | | | |
| D: 26 | SEQ ID | CAAGUGCAGAUGUAAACCAAA | SEQ ID | UUUGGUUUACAUCUGCACUUGGU |
| | NO: | | NO: 249 | |
| | 138 | | | |
| D: 27 | SEQ ID | UUUGUUCGAAAGAAUGGUGUA | SEQ ID | UACACCAUUCUUUCGAACAAAGC |
| | NO: | | NO: 250 | |
| | 139 | | | |
| D: 28 | SEQ ID | CAGAAGAUGUAGAUUGUGUGA | SEQ ID | UCACACAAUCUACAUCUUCUGCA |
| | NO: | | NO: 251 | |
| | 140 | | | |
| D: 29 | SEQ ID | UCUUUGUACUCUUGCAGAGAA | SEQ ID | UUCUCUGCAAGAGUACAAAGAUU |
| | NO: | | NO: 252 | |
| | 141 | | | |
| D: 30 | SEQ ID | CACUGUGACCCUUGCACCAAA | SEQ ID | UUUGGUGCAAGGGUCACAGUGUU |
| | NO: | | NO: 253 | |
| | 142 | | | |
| D: 31 | SEQ ID | UCCAAAUGCAGAAGAUGUAGA | SEQ ID | UCUACAUCUUCUGCAUUUGGAAG |
| | NO: | | NO: 254 | |
| | 143 | | | |
| D: 32 | SEQ ID | AAUGUCCAAGACACAGCAGAA | SEQ ID | UUCUGCUGUGUCUUGGACAUUGU |
| | NO: | | NO: 255 | |
| | 144 | | | |
| D: 33 | SEQ ID | GCCAAGAAGGGAAGGAGUACA | SEQ ID | UGUACUCCUUCCCUUCUUGGCAG |
| | NO: | | NO: 256 | |
| | 145 | | | |
| D: 34 | SEQ ID | CUUGAGUAAAUAUAUCACCAA | SEQ ID | UUGGUGAUAUAUUUACUCAAGUC |
| | NO: | | NO: 257 | |
| | 146 | | | |
| D: 35 | SEQ ID | UAGAUGAGAUCAAGAAUGACA | SEQ ID | UGUCAUUCUUGAUCUCAUCUAUU |
| | NO: | | NO: 258 | |
| | 147 | | | |
| D: 36 | SEQ ID | UUGACUUGAGUAAAUAUAUCA | SEQ ID | UGAUAUAUUUACUCAAGUCAACA |
| | NO: | | NO: 259 | |
| | 148 | | | |
| D: 37 | SEQ ID | AGUAAAUAUAUCACCACUAUA | SEQ ID | UAUAGUGGUGAUAUAUUUACUCA |
| | NO: | | NO: 260 | |
| | 149 | | | |
| D: 38 | SEQ ID | UACCAAGUGCAGAUGUAAACA | SEQ ID | UGUUUACAUCUGCACUUGGUAUU |
| | NO: | | NO: 261 | |
| | 150 | | | |
| D: 39 | SEQ ID | CUGUAUGUGAACACUGUGACA | SEQ ID | UGUCACAGUGUUCACAUACAGUA |
| | NO: | | NO: 262 | |
| | 151 | | | |
| D: 40 | SEQ ID | GAUCAAGAAUGACAAUGUCCA | SEQ ID | UGGACAUUGUCAUUCUUGAUCUC |
| | NO: | | NO: 263 | |
| | 152 | | | |
| D: 41 | SEQ ID | AUGACACUAAGUCAAGUUAAA | SEQ ID | UUUAACUUGACUUAGUGUCAUGA |
| | NO: | | NO: 264 | |
| | 153 | | | |
| D: 42 | SEQ ID | AAAUAGAUGAGAUCAAGAAUA | SEQ ID | UAUUCUUGAUCUCAUCUAUUUUG |
| | NO: | | NO: 265 | |
| | 154 | | | |
| D: 43 | SEQ ID | GUAUGUGAACACUGUGACCCA | SEQ ID | UGGGUCACAGUGUUCACAUACAG |
| | NO: | | NO: 266 | |
| | 155 | | | |
| D: 44 | SEQ ID | AAUACCAAGUGCAGAUGUAAA | SEQ ID | UUUACAUCUGCACUUGGUAUUCU |
| | NO: | | NO: 267 | |
| | 156 | | | |
| D: 45 | SEQ ID | UGAGAUCAAGAAUGACAAUGA | SEQ ID | UCAUUGUCAUUCUUGAUCUCAUC |
| | NO: | | NO: 268 | |
| | 157 | | | |
| D: 46 | SEQ ID | CUUUGUACUCUUGCAGAGAAA | SEQ ID | UUUCUCUGCAAGAGUACAAAGAU |
| | NO: | | NO: 269 | |
| | 158 | | | |
| D: 47 | SEQ ID | UGAAGCCAAAAUAGAUGAGAA | SEQ ID | UUCUCAUCUAUUUUGGCUUCAUU |
| | NO: | | NO: 270 | |
| | 159 | | | |
| D: 48 | SEQ ID | CAUCCUCAAGGACAUUACUAA | SEQ ID | UUAGUAAUGUCCUUGAGGAUGAU |
| | NO: | | NO: 271 | |
| | 160 | | | |
| D: 49 | SEQ ID | UAUGUGAACACUGUGACCCUA | SEQ ID | UAGGGUCACAGUGUUCACAUACA |
| | NO: | | NO: 272 | |
| | 161 | | | |
| D: 50 | SEQ ID | GUGUUAAUGCCCAAGUGACUA | SEQ ID | UAGUCACUUGGGCAUUAACACUU |
| | NO: | | NO: 273 | |
| | 162 | | | |
| D: 51 | SEQ ID | UUCAACUGCUUCGUAAUUGGA | SEQ ID | UCCAAUUACGAAGCAGUUGAACU |
| | NO: | | NO: 274 | |
| | 163 | | | |
| D: 52 | SEQ ID | UGCAGAAGAUGUAGAUUGUGA | SEQ ID | UCACAAUCUACAUCUUCUGCAUU |
| | NO: | | NO: 275 | |
| | 164 | | | |
| D: 53 | SEQ ID | GAGUAAAUAUAUCACCACUAA | SEQ ID | UUAGUGGUGAUAUAUUUACUCAA |
| | NO: | | NO: 276 | |
| | 165 | | | |
| D: 54 | SEQ ID | CAAGGAAUGCACACUCACCAA | SEQ ID | UUGGUGAGUGUGCAUUCCUUGAU |
| | NO: | | NO: 277 | |
| | 166 | | | |
| D: 55 | SEQ ID | CAGGUGAAAGGAAAGCUAGGA | SEQ ID | UCCUAGCUUUCCUUUCACCUGGA |
| | NO: | | NO: 278 | |
| | 167 | | | |
| D: 56 | SEQ ID | AAUGACAAUGUCCAAGACACA | SEQ ID | UGUGUCUUGGACAUUGUCAUUCU |
| | NO: | | NO: 279 | |
| | 168 | | | |
| D: 57 | SEQ ID | GGAAUGCACACUCACCAGCAA | SEQ ID | UUGCUGGUGAGUGUGCAUUCCUU |
| | NO: | | NO: 280 | |
| | 169 | | | |
| D: 58 | SEQ ID | CCUGUCCUCCAGGUGAAAGGA | SEQ ID | UCCUUUCACCUGGAGGACAGGGC |
| | NO: | | NO: 281 | |
| | 170 | | | |
| D: 59 | SEQ ID | AUGCAGAAGAUGUAGAUUGUA | SEQ ID | UACAAUCUACAUCUUCUGCAUUU |
| | NO: | | NO: 282 | |
| | 171 | | | |
| D: 60 | SEQ ID | UUGUGUGAUGAAGGACAUGGA | SEQ ID | UCCAUGUCCUUCAUCACACAAUC |
| | NO: | | NO: 283 | |
| | 172 | | | |
| D: 61 | SEQ ID | AAAGUUCAACUGCUUCGUAAA | SEQ ID | UUUACGAAGCAGUUGAACUUUCU |
| | NO: | | NO: 284 | |
| | 173 | | | |
| D: 62 | SEQ ID | UGUUAAUGCCCAAGUGACUGA | SEQ ID | UCAGUCACUUGGGCAUUAACACU |
| | NO: | | NO: 285 | |
| | 174 | | | |
| D: 63 | SEQ ID | GAUGUUGACUUGAGUAAAUAA | SEQ ID | UUAUUUACUCAAGUCAACAUCAG |
| | NO: | | NO: 286 | |
| | 175 | | | |
| D: 64 | SEQ ID | GAAGCCAAAAUAGAUGAGAUA | SEQ ID | UAUCUCAUCUAUUUUGGCUUCAU |
| | NO: | | NO: 287 | |
| | 176 | | | |
| D: 65 | SEQ ID | GUUCAACUGCUUCGUAAUUGA | SEQ ID | UCAAUUACGAAGCAGUUGAACUU |
| | NO: | | NO: 288 | |
| | 177 | | | |
| D: 66 | SEQ ID | GUACUCUUGCAGAGAAAAUUA | SEQ ID | UAAUUUUCUCUGCAAGAGUACAA |
| | NO: | | NO: 289 | |
| | 178 | | | |
| D: 67 | SEQ ID | CUCAAGGACAUUACUAGUGAA | SEQ ID | UUCACUAGUAAUGUCCUUGAGGA |
| | NO: | | NO: 290 | |
| | 179 | | | |
| D: 68 | SEQ ID | AGGGAAGGAGUACACAGACAA | SEQ ID | UUGUCUGUGUACUCCUUCCCUUC |
| | NO: | | NO: 291 | |
| | 180 | | | |
| D: 69 | SEQ ID | UCAUGACACUAAGUCAAGUUA | SEQ ID | UAACUUGACUUAGUGUCAUGACU |
| | NO: | | NO: 292 | |
| | 181 | | | |
| D: 70 | SEQ ID | CCUCAAGGACAUUACUAGUGA | SEQ ID | UCACUAGUAAUGUCCUUGAGGAU |
| | NO: | | NO: 293 | |
| | 182 | | | |
| D: 71 | SEQ ID | GGCUUUGUUCGAAAGAAUGGA | SEQ ID | UCCAUUCUUUCGAACAAAGCCUU |
| | NO: | | NO: 294 | |
| | 183 | | | |
| D: 72 | SEQ ID | CCAGACUGCGUGCCCUGCCAA | SEQ ID | UUGGCAGGGCACGCAGUCUGGUU |
| | NO: | | NO: 295 | |
| | 184 | | | |
| D: 73 | SEQ ID | AGCCAAAAUAGAUGAGAUCAA | SEQ ID | UUGAUCUCAUCUAUUUUGGCUUC |
| | NO: | | NO: 296 | |
| | 185 | | | |
| D: 74 | SEQ ID | AGAAGGGAAGGAGUACACAGA | SEQ ID | UCUGUGUACUCCUUCCCUUCUUG |
| | NO: | | NO: 297 | |
| | 186 | | | |
| D: 75 | SEQ ID | AGAUUGUGUGAUGAAGGACAA | SEQ ID | UUGUCCUUCAUCACACAAUCUAC |
| | NO: | | NO: 298 | |
| | 187 | | | |
| D: 76 | SEQ ID | UUUCACUUCGGAGGAUUGCUA | SEQ ID | UAGCAAUCCUCCGAAGUGAAAGA |
| | NO: | | NO: 299 | |
| | 188 | | | |
| D: 77 | SEQ ID | AAGGAAAGCUAGGGACUGCAA | SEQ ID | UUGCAGUCCCUAGCUUUCCUUUC |
| | NO: | | NO: 300 | |
| | 189 | | | |
| D: 78 | SEQ ID | GACAUGGCUUAGAAGUGGAAA | SEQ ID | UUUCCACUUCUAAGCCAUGUCCU |
| | NO: | | NO: 301 | |
| | 190 | | | |
| D: 79 | SEQ ID | UGUACUCUUGCAGAGAAAAUA | SEQ ID | UAUUUUCUCUGCAAGAGUACAAA |
| | NO: | | NO: 302 | |
| | 191 | | | |
| D: 80 | SEQ ID | AUGAACCAGACUGCGUGCCCA | SEQ ID | UGGGCACGCAGUCUGGUUCAUCC |
| | NO: | | NO: 303 | |
| | 192 | | | |
| D: 81 | SEQ ID | CAUGACACUAAGUCAAGUUAA | SEQ ID | UUAACUUGACUUAGUGUCAUGAC |
| | NO: | | NO: 304 | |
| | 193 | | | |
| D: 82 | SEQ ID | UUGUUCGAAAGAAUGGUGUCA | SEQ ID | UGACACCAUUCUUUCGAACAAAG |
| | NO: | | NO: 305 | |
| | 194 | | | |
| D: 83 | SEQ ID | ACACUGUGACCCUUGCACCAA | SEQ ID | UUGGUGCAAGGGUCACAGUGUUC |
| | NO: | | NO: 306 | |
| | 195 | | | |
| D: 84 | SEQ ID | GGAAAUAAACUGCACCCGGAA | SEQ ID | UUCCGGGUGCAGUUUAUUUCCAC |
| | NO: | | NO: 307 | |
| | 196 | | | |
| D: 85 | SEQ ID | AAGUGUUAAUGCCCAAGUGAA | SEQ ID | UUCACUUGGGCAUUAACACUUUU |
| | NO: | | NO: 308 | |
| | 197 | | | |
| D: 86 | SEQ ID | AGUUCAACUGCUUCGUAAUUA | SEQ ID | UAAUUACGAAGCAGUUGAACUUU |
| | NO: | | NO: 309 | |
| | 198 | | | |
| D: 87 | SEQ ID | CACUUCGGAGGAUUGCUCAAA | SEQ ID | UUUGAGCAAUCCUCCGAAGUGAA |
| | NO: | | NO: 310 | |
| | 199 | | | |
| D: 88 | SEQ ID | AUGAAGCCAAAAUAGAUGAGA | SEQ ID | UCUCAUCUAUUUUGGCUUCAUUG |
| | NO: | | NO: 311 | |
| | 200 | | | |
| D: 89 | SEQ ID | ACUUCGGAGGAUUGCUCAACA | SEQ ID | UGUUGAGCAAUCCUCCGAAGUGA |
| | NO: | | NO: 312 | |
| | 201 | | | |
| D: 90 | SEQ ID | AGGUGAAAGGAAAGCUAGGGA | SEQ ID | UCCCUAGCUUUCCUUUCACCUGG |
| | NO: | | NO: 313 | |
| | 202 | | | |
| D: 91 | SEQ ID | AAGGGAAGGAGUACACAGACA | SEQ ID | UGUCUGUGUACUCCUUCCCUUCU |
| | NO: | | NO: 314 | |
| | 203 | | | |
| D: 92 | SEQ ID | AGUGGAAAUAAACUGCACCCA | SEQ ID | UGGGUGCAGUUUAUUUCCACUUC |
| | NO: | | NO: 315 | |
| | 204 | | | |
| D: 93 | SEQ ID | AUGACAAUGUCCAAGACACAA | SEQ ID | UUGUGUCUUGGACAUUGUCAUUC |
| | NO: | | NO: 316 | |
| | 205 | | | |
| D: 94 | SEQ ID | GAUUGUGUGAUGAAGGACAUA | SEQ ID | UAUGUCCUUCAUCACACAAUCUA |
| | NO: | | NO: 317 | |
| | 206 | | | |
| D: 95 | SEQ ID | GGGGAUGAACCAGACUGCGUA | SEQ ID | UACGCAGUCUGGUUCAUCCCCAU |
| | NO | | NO: 318 | |
| | 207 | | | |
| D: 96 | SEQ ID | GUUAAUGCCCAAGUGACUGAA | SEQ ID | UUCAGUCACUUGGGCAUUAACAC |
| | NO: | | NO: 319 | |
| | 208 | | | |
| D: 97 | SEQ ID | ACCAGACUGCGUGCCCUGCCA | SEQ ID | UGGCAGGGCACGCAGUCUGGUUC |
| | NO: | | NO: 320 | |
| | 209 | | | |
| D: 98 | SEQ ID | AACACUGUGACCCUUGCACCA | SEQ ID | UGGUGCAAGGGUCACAGUGUUCA |
| | NO: | | NO: 321 | |
| | 210 | | | |
| D: 99 | SEQ ID | GGAAGGAGUACACAGACAAAA | SEQ ID | UUUUGUCUGUGUACUCCUUCCCU |
| | NO: | | NO: 322 | |
| | 211 | | | |
| D: 100 | SEQ ID | GGGAUGAACCAGACUGCGUGA | SEQ ID | UCACGCAGUCUGGUUCAUCCCCA |
| | NO: | | NO: 323 | |
| | 212 | | | |
| D: 101 | SEQ ID | CUGCGUGCCCUGCCAAGAAGA | SEQ ID | UCUUCUUGGCAGGGCACGCAGUC |
| | NO: | | NO: 324 | |
| | 213 | | | |
| D: 102 | SEQ ID | UGAACACUGUGACCCUUGCAA | SEQ ID | UUGCAAGGGUCACAGUGUUCACA |
| | NO: | | NO: 325 | |
| | 214 | | | |
| D: 103 | SEQ ID | AGGAUUGCUCAACAACCAUGA | SEQ ID | UCAUGGUUGUUGAGCAAUCCUCC |
| | NO: | | NO: 326 | |
| | 215 | | | |
| D: 104 | SEQ ID | UGACACUAAGUCAAGUUAAAA | SEQ ID | UUUUAACUUGACUUAGUGUCAUG |
| | NO: | | NO: 327 | |
| | 216 | | | |
| D: 105 | SEQ ID | UGAAAGGAAAGCUAGGGACUA | SEQ ID | UAGUCCCUAGCUUUCCUUUCACC |
| | NO: | | NO: 328 | |
| | 217 | | | |
| D: 106 | SEQ ID | ACAAUGUCCAAGACACAGCAA | SEQ ID | UUGCUGUGUCUUGGACAUUGUCA |
| | NO: | | NO: 329 | |
| | 218 | | | |
| D: 107 | SEQ ID | GUGAAAGGAAAGCUAGGGACA | SEQ ID | UGUCCCUAGCUUUCCUUUCACCU |
| | NO: | | NO: 330 | |
| | 219 | | | |
| D: 108 | SEQ ID | AGCUCUUUCACUUCGGAGGAA | SEQ ID | UUCCUCCGAAGUGAAAGAGCUUC |
| | NO: | | NO: 331 | |
| | 220 | | | |
| D: 109 | SEQ ID | UUCUUCCAAAUGCAGAAGAUA | SEQ ID | UAUCUUCUGCAUUUGGAAGAAAA |
| | NO: | | NO: 332 | |
| | 221 | | | |
| D: 110 | SEQ ID | GGAGGAUUGCUCAACAACCAA | SEQ ID | UUGGUUGUUGAGCAAUCCUCCGA |
| | NO | | NO: 333 | |
| | 222 | | | |
| D: 111 | SEQ ID | UGCCAAGAAGGGAAGGAGUAA | SEQ ID | UUACUCCUUCCCUUCUUGGCAGG |
| | NO: | | NO: 334 | |
| | 223 | | | |
| D: 112 | SEQ ID | GAAAGUUCA-(AP)- | SEQ ID | UUACGAAGCAGUUGAACUUUCUG |
| | NO: | CUGCUUCGUAA | NO: 240 | |
| | 335 | | | |
| D: 113 | SEQ ID | GUUGACUUG-(AP)- | SEQ ID | UAUAUAUUUACUCAAGUCAACAU |
| | NO: | GUAAAUAUAUA | NO: 227 | |
| | 336 | | | |
| D: 114 | SEQ ID | GUUGACUUGAGUAAAUAUAUA | SEQ ID | UAUAU-GNA (A)- |
| | NO: | | NO: 337 | UUUACUCAAGUCAACAU |
| | 116 | | | |
| D: 115 | SEQ ID | GUUGACUUGAGUAAAUAUAUA | SEQ ID | UAUAUA-GNA (U)-UUACUCAAGUCAACAU |
| | NO: | | NO: 338 | |
| | 116 | | | |
| D:236 | SEQ ID | AGAAAGUUCAACUGCUUCGUA | SEQ ID | UACGAAGCAGUUGAACUUUCUGU |
| | NO: | | NO: 577 | |
| | 576 | | | |

GNA indicates a glycol nucleic acid nucleotide (structure shown in Table 3B); (AP) means an apurinic/apyrimidinic residue, also called an abasic residue (structure shown in Table 3B).

TABLE 3B
Structures of GNA and abasic residue

| | |
|---|---|
| GNA | [chemical structure] |
| Abasic | [chemical structure] |

### Example 4

### In Vitro Knockdown of hFAS in HepG2 Cells

[0177] The RNAi agents in Tables 4A and 4B were tested in HepG2 cells. Reverse transfection was carried out by adding 24.7 μl of Opti-MEM plus 0.3 μl of Lipofectamine RNAiMAX per well to 25 μl of each 4× human FAS-GalNAc siRNA to an individual well in a 96-well collagen I-coated plate. The mixture was incubated at room temperature for 20 minutes and then fifty μl of Growth Media containing HepG2 cells at 300,000 cells/ml were added to the human FAS-GalNAc siRNA/RNAiMAX mixture. Final concentration of the siRNAs as with the above was 500 nM for a single concentration screen. Cells were incubated for 24-48 hours before RNA isolation with Quick-RNA 96 Kit. RNA was then stored at −80° C. or subject to cDNA synthesis. Briefly, cDNA was synthesized from the purified RNA using Fast Advanced RT Master Mix (Invitrogen). A master mix of 5 μl 2× Fast Advanced RT Buffer and 0.5 μl 20× Fast Advanced RT Enzyme Mix per reaction was prepared. 5.5 μl master mix and 4.5 μl RNA were mixed for a final volume of 10 μl. cDNA was generated using a ProFlex PCR System (Life Technologies) through the following steps: 37° C. for 30 minutes, 95° C. for 5 minutes, and 4° C. hold.

[0178] Two μl of cDNA were added to a master mix containing 2.5 μl of H2O, 0.5 μl 20× TaqMan Gene Expression Assay Buffer (Life Technologies) and 5 μl 2× TaqMan Universal PCR Master Mix (Life Technologies). A QuantStudio 7 Flex Real-Time PCR System (Life Technologies) was used to complete the following PCR cycles: 50° C. for 2 minutes, 95° C. for 10 minutes, 40 cycles of 95° C. for 15 seconds and 60° C. for 1 minute. TaqMan Gene Expression Assays were performed. Data analysis uses the ddCt method.

[0179] Select siRNAs from each assay were used for determining an IC50, using 1:3 serial dilution to final concentrations of 200, 67, 22, 7.41, 2.47, 0.82, and 0.27 nM FAS-GalNAc RNAi agent for concentration response curves. IC50 values were calculated using a 4-parameter fit model using XLFit.

[0180] Data is shown in Table 5.

### Example 5

### In Vivo Knockdown in hFAS-AAV Treated Mice with the FAS RNAi Agents Herein

[0181] Mice were administered AAV vector for expressing human FAS (1×1011 GC/mouse) via retroorbital injection after anesthetization via isoflurane. 100 ul of AAV (in PBS) is injected into the venous sinus and mice were monitored for recovery in cage. Two weeks following AAV administration, mice were administered a set of siRNA agents of Table 4A and 4B, as indicated in Table 6A and 6B, subcutaneously, except that all siRNA agents were lacking the phosphate addition on the 5′ end of the antisense strand for administration to mice.

[0182] Mice were sacrificed, and serum and livers (in RNAlater Stabilization Solution, Ambion) were collected. Total liver RNA was isolated, purified, and subject to QRT-PCR as described above.

[0183] Results showed the gene expression of human FAS target gene normalized to mouse Rplp0 (Life Technologies, part #: Mm01974474_gH), and represented as the relative knockdown of human FAS mRNA expression compared to vehicle-treated control animals. Knockdown results at 2 weeks post treatment at 5 mg/kg (mpk), or 10 weeks at 1 mg/kg, 3 mg/kg and 5 mg/kg doses are shown for the RNAi agents indicated in Tables 6A and 6B.

[0184] Some RNAi agents tested for gene expression knockdown in vivo were further tested for protein knock-down per Example 6.

TABLE 4A
FAS-GalNAc RNAi agents, modified sense and antisense strands

| Duplex | SEQ ID NO: | Modified Sequence |
|---|---|---|
| D: 112 | SEQ ID NO: 339 | mG*mA*mUmGmAmAfGmGfAfCfAmUmGmGmCmUmUmAmG*mA*mAP |
| | SEQ ID NO: 340 | PmU*fU*mCmUmAfAmGmCmCmAmUmGmUfCmCfUmUmCmAmUmC*mA*mC |
| D: 113 | SEQ ID NO: 341 | mU*mA*mAmAmCmCfAmAfAfCfUmUmUmUmUmUmUmGmU*mA*mAP |
| | SEQ ID NO: 342 | PmU*fU*mAmCmAfAmAmAmAmAmAmGmUfUmUfGmGmUmUmUmA*mC*mA |
| D: 114 | SEQ ID NO: 343 | mG*mA*mAmGmAmUfGmUfAfGfAmUmUmGmUmGmUmGmA*mU*mAP |
| | SEQ ID NO: 344 | PmU*fA*mUmCmAfCmAmCmAmAmUmCmUfAmCfAmUmCmUmUmC*mU*mG |
| D: 115 | SEQ ID NO: 345 | mG*mU*mUmGmAmCfUmUfGfAfGmUmAmAmAmUmAmUmA*mU*mAP |
| | SEQ ID NO: 346 | PmU*fA*mUmAmUfAmUmUmUmAmCmUmCfAmAfGmUmCmAmAmC*mA*mU |
| D: 116 | SEQ ID NO: 347 | mA*mUmCmAmAmGfAmAfUfGfAmCmAmAmUmGmUmCmC*mA*mAP |
| | SEQ ID NO: 348 | PmU*fU*mGmGmAfCmAmUmUmGmUmCmAfUmUfCmUmUmGmAmU*mC*mU |
| D: 117 | SEQ ID NO: 349 | mU*mG*mUmUmGmAfCmUfUfGfAmGmUmAmAmAmUmAmU*mA*mAP |
| | SEQ ID NO: 350 | PmU*fU*mAmUmAfUmUmUmAmCmUmCmAfAmGfUmCmAmAmCmA*mU*mC |
| D: 118 | SEQ ID NO: 351 | mG*mC*mCmAmAmAfAmUfAfGfAmUmGmAmGmAmUmCmA*mA*mAP |
| | SEQ ID NO: 352 | PmU*fUmUmGmAfUmCmUmCmAmUmCmUfAmUfUmUmUmGmGmC*mU*mU |
| D: 119 | SEQ ID NO: 353 | mA*mA*mUmGmCmAfGmAfAfGfAmUmGmUmAmGmAmUmU*mG*mAP |
| | SEQ ID NO: 354 | PmU*fC*mAmAmUfCmUmAmCmAmUmCmUfUmCfUmGmCmAmUmU*mU*mG |
| D: 120 | SEQ ID NO: 355 | mG*mC*mUmUmUmGfUmUfCfGfAmAmAmGmAmAmUmGmG*mU*mAP |
| | SEQ ID NO: 356 | PmU*fA*mCmCmAfUmUmCmUmUmUmCmGfAmAfCmAmAmAmGmC*mC*mU |
| D: 121 | SEQ ID NO: 357 | mG*mA*mCmUmUmGfAmGfUfAfAmAmUmAmUmAmUmCmA*mC*mAP |
| | SEQ ID NO: 358 | PmU*G*mUmGmAfUmAmUmAmUmUmUmAfCmUfCmAmAmGmUmC*mA*mA |
| D: 122 | SEQ ID NO: 359 | mA*mG*mAmUmGmAfGmAfUfCfAmAmGmAmAmUmGmAmC*mA*mAP |
| | SEQ ID NO: 360 | PmU*U*mGmUmCfAmUmUmCmUmUmGmAfUmCfUmCmAmUmCmU*mA*mU |
| D: 123 | SEQ ID NO: 361 | mU*mUmGmAmGmUfAmAfAfUfAmUmAmUmCmAmCmCmA*mC*mAP |
| | SEQ ID NO: 362 | PmU*fG*mUmGmGfUmGmAmUmAmUmAmUfUmUfAmCmUmCmAmA*mG*mU |
| D: 124 | SEQ ID NO: 363 | mA*mA*mUmAmGmAfUmGfAfGfAmUmCmAmAmGmAmAmU*mG*mAP |
| | SEQ ID NO: 364 | PmU*fC*mAmUmUfCmUmUmGmAmUmCmUfCmAfUmCmUmAmUmU*mU*mU |
| D: 125 | SEQ ID NO: 365 | mC*mUmUmUmGmUfUmCfGfAfAmAmGmAmAmUmGmGmU*mG*mAP |
| | SEQ ID NO: 366 | PmU*fC*mAmCmCfAmUmUmCmUmUmUmCfGmAfAmCmAmAmAmG*mC*mC |
| D: 126 | SEQ ID NO: 367 | mU*mG*mUmGmAmUfGmAfAfGfGmAmCmAmUmGmGmCmU*mU*mAP |
| | SEQ ID NO: 368 | PmU*fA*mAmGmCfCmAmUmGmUmCmCmUfUmCfAmUmCmAmCmA*mC*mA |
| D: 127 | SEQ ID NO: 369 | mU*mG*mAmCmUmUfGmAfGfUfAmAmAmUmAmUmAmUmC*mA*mAP |
| | SEQ ID NO: 370 | PmU*fU*mGmAmUfAmUmAmUmUmUmAmCfUmCfAmAmGmUmCmA*mA*mC |
| D: 128 | SEQ ID NO: 371 | mG*mA*mAmAmGmUfUmCfAfAfCmUmGmCmUmUmCmGmU*mA*mAP |
| | SEQ ID NO: 372 | PmU*fU*mAmCmGfAmAmGmCmAmGmUmUfGmAfAmCmUmUmUmC*mU*mG |
| D: 129 | SEQ ID NO: 373 | mG*mC*mAmGmAmAfGmAfUfGfUmAmGmAmUmUmGmUmG*mU*mAP |
| | SEQ ID NO: 374 | PmU*fA*mCmAmCfAmAmUmCmUmAmCmAfUmCfUmUmCmUmGmC*mA*mU |
| D: 130 | SEQ ID NO: 375 | mU*mG*mUmGmAmAfCmAfCfUfGmUmGmAmCmCmCmUmU*mG*mAP |
| | SEQ ID NO: 376 | PmU*fC*mAmAmGfGmGmUmCmAmCmAmGfUmGfUmUmCmAmCmA*mU*mA |
| D: 131 | SEQ ID NO: 377 | mG*mA*mCmAmCmUfAmAfGfUfCmAmAmGmUmUmAmAmA*mG*mAP |
| | SEQ ID NO: 378 | PmU*fC*mUmUmUfAmAmCmUmUmGmAmCfUmUfAmGmUmGmUmC*mA*mU |
| D: 132 | SEQ ID NO: 379 | mG*mA*mAmUmAmCfCmAfAfGfUmGmCmAmGmAmUmGmU*mA*mAP |
| | SEQ ID NO: 380 | PmU*fU*mAmCmAfUmCmUmGmCmAmCmUfUmGfGmUmAmUmUmC*mU*mG |
| D: 133 | SEQ ID NO: 381 | mG*mA*mCmAmAmUfGmUfCfCfAmAmGmAmCmAmCmAmG*mC*mAP |
| | SEQ ID NO: 382 | PmU*fG*mCmUmGfUmGmUmCmUmUmGmGfAmCfAmUmUmGmUmC*mA*mU |
| D: 134 | SEQ ID NO: 383 | mA*mU*mGmAmAmGfGmAfCfAfUmGmGmCmUmUmAmGmA*mA*mAP |
| | SEQ ID NO: 384 | PmU*fU*mUmCmUfAmAmGmCmCmAmUmGfUmCfCmUmUmCmAmU*mC*mA |
| D: 135 | SEQ ID NO: 385 | mU*mU*mCmCmAmAfAmUfGfCfAmGmAmAmGmAmUmGmU*mA*mAP |
| | SEQ ID NO: 386 | PmU*fU*mAmCmAfUmCmUmUmCmUmGmCfAmUfUmUmGmGmAmA*mG*mA |
| D: 136 | SEQ ID NO: 387 | mG*mA*mGmAmUmCfAmAfGfAfAmUmGmAmCmAmAmUmG*mU*mAP |
| | SEQ ID NO: 388 | PmU*FA*mCmAmUfUmGmUmCmAmUmUmCfUmUfGmAmUmCmUmC*mA*mU |
| D: 137 | SEQ ID NO: 389 | mC*mA*mAmGmUmGfCmAfGfAfUmGmUmAmAmAmCmCmA*mA*mAP |
| | SEQ ID NO: 390 | PmU*fUmUmGmGfUmUmUmAmCmAmUmCfUmGfCmAmCmUmUmG*mG*mU |
| D: 138 | SEQ ID NO: 391 | mU*mU*mUmGmUmUfCmGfAfAfAmGmAmAmUmGmGmUmG*mU*mAP |
| | SEQ ID NO: 392 | PmU*fA*mCmAmCfCmAmUmUmCmUmUmUfCmGfAmAmCmAmAmA*mG*mC |
| D: 139 | SEQ ID NO: 393 | mC*mA*mGmAmAmGfAmUfGfUfAmGmAmUmUmGmUmGmU*mG*mAP |
| | SEQ ID NO: 394 | PmU*fC*mAmCmAfCmAmAmUmCmUmAmCfAmUfCmUmUmCmUmG*mC*mA |
| D: 140 | SEQ ID NO: 395 | mU*mC*mUmUmUmGfUmAfCfUfCmUmUmGmCmAmGmAmG*mA*mAP |
| | SEQ ID NO: 396 | PmU*fU*mCmUmCfUmGmCmAmAmGmAmGfUmAfCmAmAmAmGmA*mU*mU |
| D: 141 | SEQ ID NO: 397 | mC *mA*mCmUmGmUfGmAfCfCfCmUmUmGmCmAmCmCmA*mA*mAP |
| | SEQ ID NO: 398 | PmU*fU*mUmGmGfUmGmCmAmAmGmGmGfUmCfAmCmAmGmUmG*mU*mU |
| D: 142 | SEQ ID NO: 399 | mU*mC*mCmAmAmAfUmGfCfAfGmAmAmGmAmUmGmUmA*mG*mAP |
| | SEQ ID NO: 400 | PmU*C*mUmAmCfAmUmCmUmUmCmUmGfCmAfUmUmUmGmGmA*mA*mG |
| D: 143 | SEQ ID NO: 401 | mA*mA*mUmGmUmCfCmAfAfGfAmCmAmCmAmGmCmAmG*mA*mAP |
| | SEQ ID NO: 402 | PmU*fU*mCmUmGfCmUmGmUmGmUmCmUfUmGfGmAmCmAmUmU*mG*mU |
| D: 144 | SEQ ID NO: 403 | mG*mC*mCmAmAmGfAmAfGfGfGmAmAmGmGmAmGmUmA*mC*mAP |
| | SEQ ID NO: 404 | PmU*fG*mUmAmCfUmCmCmUmUmCmCmCfUmUfCmUmUmGmGmC*mA*mG |
| D: 145 | SEQ ID NO: 405 | mC*mUmUmGmAmGfUmAfAfAfUmAmUmAmUmCmAmCmC*mA*mAP |
| | SEQ ID NO: 406 | PmU*fU*mGmGmUfGmAmUmAmUmAmUmUfUmAfCmUmCmAmAmG*mU*mC |
| D: 146 | SEQ ID NO: 407 | mU*mA*mGmAmUmGfAmGfAfUfCmAmAmGmAmAmUmGmA*mC*mAP |
| | SEQ ID NO: 408 | PmU*fG*mUmCmAfUmUmCmUmUmGmAmUfCmUfCmAmUmCmUmA*mU*mU |
| D: 147 | SEQ ID NO: 409 | mU*mU*mGmAmCmUfUmGfAfGfUmAmAmAmUmAmUmAmU*mC*mAP |
| | SEQ ID NO: 410 | PmU*fG*mAmUmAfUmAmUmUmUmAmCmUfCmAfAmGmUmCmAmA*mC*mA |
| D: 148 | SEQ ID NO: 411 | mA*mG*mUmAmAmAfUmAfUfAfUmCmAmCmCmAmCmUmA*mU*mAP |
| | SEQ ID NO: 412 | PmU*fA*mUmAmGfUmGmGmUmGmAmUmAfUmAfUmUmUmAmCmU*mC*mA |
| D: 149 | SEQ ID NO: 413 | mU*mA*mCmCmAmAfGmUfGfCfAmGmAmUmGmUmAmAmA*mC*mAP |
| | SEQ ID NO: 414 | PmU*fG*mUmUmUfAmCmAmUmCmUmGmCfAmCfUmUmGmGmUmA*mU*mU |
| D: 150 | SEQ ID NO: 415 | mC*mU*mGmUmAmUfGmUfGfAfAmCmAmCmUmGmUmGmA*mC*mAP |
| | SEQ ID NO: 416 | PmU*FG*mUmCmAfCmAmGmUmGmUmUmCfAmCfAmUmAmCmAmG*mU*mA |
| D: 151 | SEQ ID NO: 417 | mG*mA*mUmCmAmAfGmAfAfUfGmAmCmAmAmUmGmUmC*mC*mAP |
| | SEQ ID NO: 418 | PmU*FG*mGmAmCfAmUmUmGmUmCmAmUfUmCfUmUmGmAmUmC*mU*mC |
| D: 152 | SEQ ID NO: 419 | mA*mU*mGmAmCmAfCmUfAfAfGmUmCmAmAmGmUmUmA*mA*mAP |
| | SEQ ID NO: 420 | PmU*fUmUmAmAfCmUmUmGmAmCmUmUfAmGfUmGmUmCmAmU*mG*mA |
| D: 153 | SEQ ID NO: 421 | mA*mA*mAmUmAmGfAmUfGfAfGmAmUmCmAmAmGmAmA*mU*mAP |
| | SEQ ID NO: 422 | PmU*fA*mUmUmCfUmUmGmAmUmCmUmCfAmUfCmUmAmUmUmU*mU*mG |
| D: 154 | SEQ ID NO: 423 | mG*mU*mAmUmGmUfGmAfAfCfAmCmUmGmUmGmAmCmC*mC*mAP |
| | SEQ ID NO: 424 | PmU*fG*mGmGmUfCmAmCmAmGmUmGmUfUmCfAmCmAmUmAmC*mA*mG |
| D: 155 | SEQ ID NO: 425 | mA*mA*mUmAmCmCfAmAfGfUfGmCmAmGmAmUmGmUmA*mA*mAP |
| | SEQ ID NO: 426 | PmU*U*mUmAmCfAmUmCmUmGmCmAmCfUmUfGmGmUmAmUmU*mC*mU |
| D: 156 | SEQ ID NO: 427 | mU*mG*mAmGmAmUfCmAfAfGfAmAmUmGmAmCmAmAmU*mG*mAP |
| | SEQ ID NO: 428 | PmU*fC*mAmUmUfGmUmCmAmUmUmCmUfUmGfAmUmCmUmCmA*mU*mC |
| D: 157 | SEQ ID NO: 429 | mC*mU*mUmUmGmUfAmCfUfCfUmUmGmCmAmGmAmGmA*mA*mAP |
| | SEQ ID NO: 430 | PmU*fU*mUmCmUfCmUmGmCmAmAmGmAfGmUfAmCmAmAmAmG*mA*mU |
| D: 158 | SEQ ID NO: 431 | mUmG*mAmAmGmCfCmAfAfAfAmUmAmGmAmUmGmAmG*mA*mAP |
| | SEQ ID NO: 432 | PmU*fU*mCmUmCfAmUmCmUmAmUmUmUfUmGfGmCmUmUmCmA*mU*mU |
| D: 159 | SEQ ID NO: 433 | mC*mA*mUmCmCmUfCmAfAfGfGmAmCmAmUmUmAmCmU*mA*mAP |
| | SEQ ID NO: 434 | PmU*fUmAmGmUfAmAmUmGmUmCmCmUfUmGfAmGmGmAmUmG*mA*mU |
| D: 160 | SEQ ID NO: 435 | mU*mA*mUmGmUmGfAmAfCfAfCmUmGmUmGmAmCmCmC*mU*mAP |
| | SEQ ID NO: 436 | PmU*fA*mGmGmGfUmCmAmCmAmGmUmGfUmUfCmAmCmAmUmA*mC*mA |
| D: 161 | SEQ ID NO: 437 | mG*mU*mGmUmUmAfAmUfGfCfCmCmAmAmGmUmGmAmC*mU*mAP |
| | SEQ ID NO: 438 | PmU*fA*mGmUmCfAmCmUmUmGmGmGmCfAmUfUmAmAmCmAmC*mU*mU |
| D: 162 | SEQ ID NO: 439 | mU*mU*mCmAmAmCfUmGfCfUfUmCmGmUmAmAmUmUmG*mG*mAP |
| | SEQ ID NO: 440 | PmU*fC*mCmAmAfUmUmAmCmGmAmAmGfCmAfGmUmUmGmAmA*mC*mU |
| D: 163 | SEQ ID NO: 441 | mU*mG*mCmAmGmAfAmGfAfUfGmUmAmGmAmUmUmGmU*mG*mAP |
| | SEQ ID NO: 442 | PmU*fC*mAmCmAfAmUmCmUmAmCmAmUfCmUfUmCmUmGmCmA*mU*mU |
| D: 164 | SEQ ID NO: 443 | mG*mA*mGmUmAmAfAmUfAfUfAmUmCmAmCmCmAmCmU*mA*mAP |
| | SEQ ID NO: 444 | PmU*FU*mAmGmUfGmGmUmGmAmUmAmUfAmUfUmUmAmCmUmC*mA*mA |
| D: 165 | SEQ ID NO: 445 | mC*mA*mAmGmGmAfAmUfGfCfAmCmAmCmUmCmAmCmC*mA*mAP |
| | SEQ ID NO: 446 | PmU*fU*mGmGmUfGmAmGmUmGmUmGmCfAmUfUmCmCmUmUmG*mA*mU |
| D: 166 | SEQ ID NO: 447 | mC*mA*mGmGmUmGfAmAfAfGfGmAmAmAmGmCmUmAmG*mG*mAP |
| | SEQ ID NO: 448 | PmU*fC*mCmUmAfGmCmUmUmUmCmCmUfUmUfCmAmCmCmUmG*mG*mA |
| D: 167 | SEQ ID NO: 449 | mA*mA*mUmGmAmCfAmAfUfGfUmCmCmAmAmGmAmCmA*mC*mAP |
| | SEQ ID NO: 450 | PmU*fG*mUmGmUfCmUmUmGmGmAmCmAfUmUfGmUmCmAmUmU*mC*mU |
| D: 168 | SEQ ID NO: 451 | mG*mG*mAmAmUmGfCmAfCfAfCmUmCmAmCmCmAmGmC*mA*mAP |
| | SEQ ID NO: 452 | PmU*fU*mGmCmUfGmGmUmGmAmGmUmGfUmGfCmAmUmUmCmC*mU*mU |
| D: 169 | SEQ ID NO: 453 | mC*mC*mUmGmUmCfCmUfCfCfAmGmGmUmGmAmAmAmG*mG*mAP |
| | SEQ ID NO: 454 | PmU*C*mCmUmUfUmCmAmCmCmUmGmGfAmGfGmAmCmAmGmG*mG*mC |
| D: 170 | SEQ ID NO: 455 | mA*mU*mGmCmAmGfAmAfGfAfUmGmUmAmGmAmUmUmG*mU*mAP |
| | SEQ ID NO: 456 | PmU*A*mCmAmAfUmCmUmAmCmAmUmCfUmUfCmUmGmCmAmU*mU*mU |
| D: 171 | SEQ ID NO: 457 | mU*mU*mGmUmGmUfGmAfUfGfAmAmGmGmAmCmAmUmG*mG*mAP |
| | SEQ ID NO: 458 | PmU*fC*mCmAmUfGmUmCmCmUmUmCmAfUmCfAmCmAmCmAmA*mU*mC |
| D: 172 | SEQ ID NO: 459 | mA*mA*mAmGmUmUfCmAfAfCfUmGmCmUmUmCmGmUmA*mA*mAP |
| | SEQ ID NO: 460 | PmU*fU*mUmAmCfGmAmAmGmCmAmGmUfUmGfAmAmCmUmUmU*mC*mU |
| D: 173 | SEQ ID NO: 461 | mU*mG*mUmUmAmAfUmGfCfCfCmAmAmGmUmGmAmCmU*mG*mAP |
| | SEQ ID NO: 462 | PmU*fC*mAmGmUfCmAmCmUmUmGmGmGfCmAfUmUmAmAmCmA*mC*mU |
| D: 174 | SEQ ID NO: 463 | mG*mA*mUmGmUmUfGmAfCfUfUmGmAmGmUmAmAmAmU*mA*mAP |
| | SEQ ID NO: 464 | PmU*fU*mAmUmUfUmAmCmUmCmAmAmGfUmCfAmAmCmAmUmC*mA*mG |
| D: 175 | SEQ ID NO: 465 | mG*mA*mAmGmCmCfAmAfAfAfUmAmGmAmUmGmAmGmA*mU*mAP |
| | SEQ ID NO: 466 | PmU*fA*mUmCmUfCmAmUmCmUmAmUmUfUmUfGmGmCmUmUmC*mA*mU |
| D: 176 | SEQ ID NO: 467 | mG*mU*mUmCmAmAfCmUfGfCfUmUmCmGmUmAmAmUmU*mG*mAP |
| | SEQ ID NO: 468 | PmU*fC*mAmAmUfUmAmCmGmAmAmGmCfAmGfUmUmGmAmAmC*mU*mU |
| D: 177 | SEQ ID NO: 469 | mG*mU*mAmCmUmCfUmUfGfCfAmGmAmGmAmAmAmAmU*mU*mAP |
| | SEQ ID NO: 470 | PmU*A*mAmUmUfUmUmCmUmCmUmGmCfAmAfGmAmGmUmAmC*mA*mA |
| D: 178 | SEQ ID NO: 471 | mC*mU*mCmAmAmGfGmAfCfAfUmUmAmCmUmAmGmUmG*mA*mAP |
| | SEQ ID NO: 472 | PmU*U*mCmAmCfUmAmGmUmAmAmUmGfUmCfCmUmUmGmAmG*mG*mA |
| D: 179 | SEQ ID NO: 473 | mA*mG*mGmGmAmAfGmGfAfGfUmAmCmAmCmAmGmAmC*mA*mAP |
| | SEQ ID NO: 474 | PmU*fU*mGmUmCfUmGmUmGmUmAmCmUfCmCfUmUmCmCmCmU*mU*mC |
| D: 180 | SEQ ID NO: 475 | mUmC*mAmUmGmAfCmAfCfUfAmAmGmUmCmAmAmGmU*mU*mAP |
| | SEQ ID NO: 476 | PmU*fA*mAmCmUfUmGmAmCmUmUmAmGfUmGfUmCmAmUmGmA*mC*mU |
| D: 181 | SEQ ID NO: 477 | mC*mC*mUmCmAmAfGmGfAfCfAmUmUmAmCmUmAmGmU*mG*mAP |
| | SEQ ID NO: 478 | PmU*fC*mAmCmUfAmGmUmAmAmUmGmUfCmCfUmUmGmAmGmG*mA*mU |
| D: 182 | SEQ ID NO: 479 | mG*mG*mCmUmUmUfGmUfUfCfGmAmAmAmGmAmAmUmG*mG*mAP |
| | SEQ ID NO: 480 | PmU*fC*mCmAmUfUmCmUmUmUmCmGmAfAmCfAmAmAmGmCmC*mU*mU |
| D: 183 | SEQ ID NO: 481 | mC*mC*mAmGmAmCfUmGfCfGfUmGmCmCmCmUmGmCmC*mA*mAP |
| | SEQ ID NO: 482 | PmU*fU*mGmGmCfAmGmGmGmCmAmCmGfCmAfGmUmCmUmGmG*mU*mU |
| D: 184 | SEQ ID NO: 483 | mA*mG*mCmCmAmAfAmAfUfAfGmAmUmGmAmGmAmUmC*mA*mAP |
| | SEQ ID NO: 484 | PmU*fUmGmAmUfCmUmCmAmUmCmUmAfUmUfUmUmGmGmCmU*mU*mC |
| D: 185 | SEQ ID NO: 485 | mA*mG*mAmAmGmGfGmAfAfGfGmAmGmUmAmCmAmCmA*mG*mAP |
| | SEQ ID NO: 486 | PmU*fC*mUmGmUfGmUmAmCmUmCmCmUfUmCfCmCmUmUmCmU*mU*mG |
| D: 186 | SEQ ID NO: 487 | mA*mG*mAmUmUmGfUmGfUfGfAmUmGmAmAmGmGmAmC*mA*mAP |
| | SEQ ID NO: 488 | PmU*fU*mGmUmCfCmUmUmCmAmUmCmAfCmAfCmAmAmUmCmU*mA*mC |
| D: 187 | SEQ ID NO: 489 | mU*mU*mUmCmAmCfUmUfCfGfGmAmGmGmAmUmUmGmC*mU*mAP |
| | SEQ ID NO: 490 | PmU*fA*mGmCmAfAmUmCmCmUmCmCmGfAmAfGmUmGmAmAmA*mG*mA |
| D: 188 | SEQ ID NO: 491 | mA*mA*mGmGmAmAfAmGfCfUfAmGmGmGmAmCmUmGmC*mA*mAP |
| | SEQ ID NO: 492 | PmU*fU*mGmCmAfGmUmCmCmCmUmAmGfCmUfUmUmCmCmUmU*mU*mC |
| D: 189 | SEQ ID NO: 493 | mG*mA*mCmAmUmGfGmCfUfUfAmGmAmAmGmUmGmGmA*mA*mAP |
| | SEQ ID NO: 494 | PmU*fU*mUmCmCfAmCmUmUmCmUmAmAfGmCfCmAmUmGmUmC*mC*mU |
| D: 190 | SEQ ID NO: 495 | mU*mG*mUmAmCmUfCmUfUfGfCmAmGmAmGmAmAmAmA*mU*mAP |
| | SEQ ID NO: 496 | PmU*A*mUmUmUfUmCmUmCmUmGmCmAfAmGfAmGmUmAmCmA*mA*mA |
| D: 191 | SEQ ID NO: 497 | mA*mU*mGmAmAmCfCmAfGfAfCmUmGmCmGmUmGmCmC*mC*mAP |
| | SEQ ID NO: 498 | PmU*fG*mGmGmCfAmCmGmCmAmGmUmCfUmGfGmUmUmCmAmU*mC*mC |
| D: 192 | SEQ ID NO: 499 | mC*mA*mUmGmAmCfAmCfUfAfAmGmUmCmAmAmGmUmU*mA*mAP |
| | SEQ ID NO: 500 | PmU*fUmAmAmCfUmUmGmAmCmUmUmAfGmUfGmUmCmAmUmG*mA*mC |
| D: 193 | SEQ ID NO: 501 | mU*mU*mGmUmUmCfGmAfAfAfGmAmAmUmGmGmUmGmU*mC*mAP |
| | SEQ ID NO: 502 | PmU*fG*mAmCmAfCmCmAmUmUmCmUmUfUmCfGmAmAmCmAmA*mA*mG |
| D: 194 | SEQ ID NO: 503 | mA*mC*mAmCmUmGfUmGfAfCfCmCmUmUmGmCmAmCmC*mA*mAP |
| | SEQ ID NO: 504 | PmU*FU*mGmGmUfGmCmAmAmGmGmGmUfCmAfCmAmGmUmGmU*mU*mC |
| D: 195 | SEQ ID NO: 505 | mG*mG*mAmAmAmUfAmAfAfCfUmGmCmAmCmCmCmGmG*mA*mAP |
| | SEQ ID NO: 506 | PmU*fU*mCmCmGfGmGmUmGmCmAmGmUfUmUfAmUmUmUmCmC*mA*mC |
| D: 196 | SEQ ID NO: 507 | mA*mA*mGmUmGmUfUmAfAfUfGmCmCmCmAmAmGmUmG*mA*mAP |
| | SEQ ID NO: 508 | PmU*fU*mCmAmCfUmUmGmGmGmCmAmUfUmAfAmCmAmCmUmU*mU*mU |
| D: 197 | SEQ ID NO: 509 | mA*mG*mUmUmCmAfAmCfUfGfCmUmUmCmGmUmAmAmU*mU*mAP |
| | SEQ ID NO: 510 | PmU*fA*mAmUmUfAmCmGmAmAmGmCmAfGmUfUmGmAmAmCmU*mU*mU |
| D: 198 | SEQ ID NO: 511 | mC *mA*mCmUmUmCfGmGfAfGfGmAmUmUmGmCmUmCmA*mA*mAP |
| | SEQ ID NO: 512 | PmU*FU*mUmGmAfGmCmAmAmUmCmCmUfCmCfGmAmAmGmUmG*mA*mA |
| D: 199 | SEQ ID NO: 513 | mA*mU*mGmAmAmGfCmCfAfAfAmAmUmAmGmAmUmGmA*mG*mAP |
| | SEQ ID NO: 514 | PmU*fC*mUmCmAfUmCmUmAmUmUmUmUfGmGfCmUmUmCmAmU*mU*mG |
| D: 200 | SEQ ID NO: 515 | mA*mC*mUmUmCmGfGmAfGfGfAmUmUmGmCmUmCmAmA*mC*mAP |
| | SEQ ID NO: 516 | PmU*FG*mUmUmGfAmGmCmAmAmUmCmCfUmCfCmGmAmAmGmU*mG*mA |
| D: 201 | SEQ ID NO: 517 | mA*mG*mGmUmGmAfAmAfGfGfAmAmAmGmCmUmAmGmG*mG*mAP |
| | SEQ ID NO: 518 | PmU*fC*mCmCmUfAmGmCmUmUmUmCmCfUmUfUmCmAmCmCmU*mG*mG |
| D: 202 | SEQ ID NO: 519 | mA*mA*mGmGmGmAfAmGfGfAfGmUmAmCmAmCmAmGmA*mC*mAP |
| | SEQ ID NO: 520 | PmU*fG*mUmCmUfGmUmGmUmAmCmUmCfCmUfUmCmCmCmUmU*mC*mU |
| D: 203 | SEQ ID NO: 521 | mA*mG*mUmGmGmAfAmAfUfAfAmAmCmUmGmCmAmCmC*mC*mAP |
| | SEQ ID NO: 522 | PmU*fG*mGmGmUfGmCmAmGmUmUmUmAfUmUfUmCmCmAmCmU*mU*mC |
| D: 204 | SEQ ID NO: 523 | mA*mU*mGmAmCmAfAmUfGfUfCmCmAmAmGmAmCmAmC*mA*mAP |
| | SEQ ID NO: 524 | PmU* fU*mGmUmGfUmCmUmUmGmGmAmCfAmUfUmGmUmCmAmU*mU*mC |
| D: 205 | SEQ ID NO: 525 | mG*mA*mUmUmGmUfGmUfGfAfUmGmAmAmGmGmAmCmA*mU*mAP |
| | SEQ ID NO: 526 | PmU*fA*mUmGmUfCmCmUmUmCmAmUmCfAmCfAmCmAmAmUmC*mU*mA |
| D: 206 | SEQ ID NO: 527 | mG*mG*mGmGmAmUfGmAfAfCfCmAmGmAmCmUmGmCmG*mU*mAP |
| | SEQ ID NO: 528 | PmU*fA*mCmGmCfAmGmUmCmUmGmGmUfUmCfAmUmCmCmCmC*mA*mU |
| D: 207 | SEQ ID NO: 529 | mG*mU*mUmAmAmUfGmCfCfCfAmAmGmUmGmAmCmUmG*mA*mAP |
| | SEQ ID NO: 530 | PmU*fU*mCmAmGfUmCmAmCmUmUmGmGfGmCfAmUmUmAmAmC*mA*mC |
| D: 208 | SEQ ID NO: 531 | mA*mC*mCmAmGmAfCmUfGfCfGmUmGmCmCmCmUmGmC*mC*mAP |
| | SEQ ID NO: 532 | PmU*fG*mGmCmAfGmGmGmCmAmCmGmCfAmGfUmCmUmGmGmU*mU*mC |
| D: 209 | SEQ ID NO: 533 | mA*mA*mCmAmCmUfGmUfGfAfCmCmCmUmUmGmCmAmC*mC*mAP |
| | SEQ ID NO: 534 | PmU*fG*mGmUmGfCmAmAmGmGmGmUmCfAmCfAmGmUmGmUmU*mC*mA |
| D: 210 | SEQ ID NO: 535 | mG*mG*mAmAmGmGfAmGfUfAfCmAmCmAmGmAmCmAmA*mA*mAP |
| | SEQ ID NO: 536 | PmU*fU*mUmUmGfUmCmUmGmUmGmUmAfCmUfCmCmUmUmCmC*mC*mU |
| D: 211 | SEQ ID NO: 537 | mG*mG*mGmAmUmGfAmAfCfCfAmGmAmCmUmGmCmGmU*mG*mAP |
| | SEQ ID NO: 538 | PmU*fC*mAmCmGfCmAmGmUmCmUmGmGfUmUfCmAmUmCmCmC*mC*mA |
| D: 212 | SEQ ID NO: 539 | mC*mU*mGmCmGmUfGmCfCfCfUmGmCmCmAmAmGmAmA*mG*mAP |
| | SEQ ID NO: 540 | PmU*fC*mUmUmCfUmUmGmGmCmAmGmGfGmCfAmCmGmCmAmG*mU*mC |
| D: 213 | SEQ ID NO: 541 | mU*mG*mAmAmCmAfCmUfGfUfGmAmCmCmCmUmUmGmC*mA*mAP |
| | SEQ ID NO: 542 | PmU*fU*mGmCmAfAmGmGmGmUmCmAmCfAmGfUmGmUmUmCmA*mC*mA |
| D: 214 | SEQ ID NO: 543 | mA*mG*mGmAmUmUfGmCfUfCfAmAmCmAmAmCmCmAmU*mG*mAP |
| | SEQ ID NO: 544 | PmU*fC*mAmUmGfGmUmUmGmUmUmGmAfGmCfAmAmUmCmCmU*mC*mC |
| D: 215 | SEQ ID NO: 545 | mU*mG*mAmCmAmCfUmAfAfGfUmCmAmAmGmUmUmAmA*mA*mAP |
| | SEQ ID NO: 546 | PmU*fU*mUmUmAfAmCmUmUmGmAmCmUfUmAfGmUmGmUmCmA*mU*mG |
| D: 216 | SEQ ID NO: 547 | mU*mG*mAmAmAmGfGmAfAfAfGmCmUmAmGmGmGmAmC*mU*mAP |
| | SEQ ID NO: 548 | PmU*fA*mGmUmCfCmCmUmAmGmCmUmUfUmCfCmUmUmUmCmA*mC*mC |
| D: 217 | SEQ ID NO: 549 | mA*mC*mAmAmUmGfUmCfCfAfAmGmAmCmAmCmAmGmC*mA*mAP |
| | SEQ ID NO: 550 | PmU*fU*mGmCmUfGmUmGmUmCmUmUmGfGmAfCmAmUmUmGmU*mC*mA |
| D: 218 | SEQ ID NO: 551 | mG*mU*mGmAmAmAfGmGfAfAfAmGmCmUmAmGmGmGmA*mC*mAP |
| | SEQ ID NO: 552 | PmU*FG*mUmCmCfCmUmAmGmCmUmUmUfCmCfUmUmUmCmAmC*mC*mU |
| D: 219 | SEQ ID NO: 553 | mA*mG*mCmUmCmUfUmUfCfAfCmUmUmCmGmGmAmGmG*mA*mAP |
| | SEQ ID NO: 554 | PmU*fU*mCmCmUfCmCmGmAmAmGmUmGfAmAfAmGmAmGmCmU*mU*mC |
| D: 220 | SEQ ID NO: 555 | mU*mU*mCmUmUmCfCmAfAfAfUmGmCmAmGmAmAmGmA*U*mAP |
| | SEQ ID NO: 556 | PmU*fA*mUmCmUfUmCmUmGmCmAmUmUfUmGfGmAmAmGmAmA*mA*mA |
| D: 221 | SEQ ID NO: 557 | mG*mG*mAmGmGmAfUmUfGfCfUmCmAmAmCmAmAmCmC*mA*mAP |
| | SEQ ID NO: 558 | PmU*fU*mGmGmUfUmGmUmUmGmAmGmCfAmAfUmCmCmUmCmC*mG*mA |
| D: 222 | SEQ ID NO: 559 | mU*mG*mCmCmAmAfGmAfAfGfGmGmAmAmGmGmAmGmU*mA*mAP |
| | SEQ ID NO: 560 | PmU*fU*mAmCmUfCmCmUmUmCmCmCmUfUmCfUmUmGmGmCmA*mG*mG |
| D: 223 | SEQ ID NO: 561 | mG*mA*mAmAmGmUfUmCFA-(AP)-fCmUmGmCmUmUmCmGmU*mA*mAP |
| | SEQ ID NO: 562 | mU*fU*mAmCmGmAmAmGmCmAmGmUmUfGmAfAmCmUmUmUmC*mU*mG |
| D: 224 | SEQ ID NO: 561 | mG*mA*mAmAmGmUfUmCFA-(AP)-fCmUmGmCmUmUmCmGmU*mA*mAP |
| | SEQ ID NO: 563 | mU*U*mAmCfGmAfAmGmCmAmGmUmUfGmAfAmCmUmUmUmC*mU*mG |
| D: 225 | SEQ ID NO: 561 | mG*mA*mAmAmGmUfUmCFA-(AP)-fCmUmGmCmUmUmCmGmU*mA*mAP |
| | SEQ ID NO: 571 | mU*fU*fAmCmGmAfAmGmCmAmGmUmUfGmAfAmCmUmUmUmC*mU*mG |
| D: 226 | SEQ ID NO: 564 | mG*mA*mAmAmGmUmUmCfAfAfCmUmGmCmUmUmCmGmU*mA*mAP |
| | SEQ ID NO: 563 | mU*fU*mAmCfGmAfAmGmCmAmGmUmUfGmAfAmCmUmUmUmC*mU*mG |
| D: 227 | SEQ ID NO: 564 | mG*mA*mAmAmGmUmUmCfAfAfCmUmGmCmUmUmCmGmU*mA*mAP |
| | SEQ ID NO: 571 | mU*fU*fAmCmGmAfAmGmCmAmGmUmUfGmAfAmCmUmUmUmC*mU*mG |
| D: 228 | SEQ ID NO: 565 | mG*mU*mUmGmAmC fUmUfG-(AP)-fGmUmAmAmAmUmAmUmA*mU*mAP |
| | SEQ ID NO: 566 | mU*fA*mUmAfUmAfUmUmUmAmCmUmCfAmAfGmUmCmAmAmC*mA*mU |
| D: 229 | SEQ ID NO: 565 | mG*mU*mUmGmAmC fUmUfG-(AP)-fGmUmAmAmAmUmAmUmA*mU*mAP |
| | SEQ ID NO: 567 | mU*fA*fUmAmUmAfUmUmUmAmCmUmCfAmAfGmUmCmAmAmC*mA*mU |
| D: 230 | SEQ ID NO: 568 | mG*mU*mUmGmAmCmUmUfGfAfGmUmAmAmAmUmAmUmA*mU*mAP |
| | SEQ ID NO: 566 | mU*fA*mUmAfUmAfUmUmUmAmCmUmCfAmAfGmUmCmAmAmC*mA*mU |
| D: 231 | SEQ ID NO: 568 | mG*mUmUmGmAmCmUmUfGfAfGmUmAmAmAmUmAmUmA*mU*mAP |
| | SEQ ID NO: 567 | mU*fA*fUmAmUmAfUmUmUmAmCmUmCfAmAfGmUmCmAmAmC*mA*mU |
| D: 232 | SEQ ID NO: 345 | mG*mU*mUmGmAmCfUmUfGfAfGmUmAmAmAmUmAmUmA*mU*mAP |
| | SEQ ID NO: 569 | mU*fA*mUmAfU-GNA(A)- |
| | | fUmUmUmAmCmUmCfAmAfGmUmCmAmAmC*mA*mU |
| D: 233 | SEQ ID NO: 345 | mG*mUmUmGmAmCfUmUfGfAfGmUmAmAmAmUmAmUmA*mU*mAP |
| | SEQ ID NO: 570 | mU*fA*mUmAmUFA-GNA(U)- |
| | | mUmUmAmCmUmCfAmAfGmUmCmAmAmC*mA*mU |
| D: 237 | SEQ ID NO: 578 | mA*mG*mAmAmAmGfUmUfCfAfAmCmUmGmCmUmUmCmG*mU*mAP |
| | SEQ ID NO: 579 | mU*fA*mCmGmAfAmGmCmAmGmUmUmGfAmAfCmUmUmUmCmU*mG*mU |
| D: 238 | SEQ ID NO: 580 | mC *mUmGmUmAmUmGmUfGfAfAmCmAmCmUmGmUmGmA*mC*mAP |
| | SEQ ID NO: 581 | mU*fG*fUmCmAmCfAmGmUmGmUmUmCfAmCfAmUmAmCmAmG*mU*mA |
| D: 239 | SEQ ID NO: 582 | mU*mG*mAmCmUmUmGmAfGfUfAmAmAmUmAmUmAmUmC*mA*mAP |
| | SEQ ID NO: 583 | mU*fU*fGmAmUmAfUmAmUmUmUmAmCfUmCfAmAmGmUmCmA*mA*mC |
| D: 240 | SEQ ID NO: 584 | mG*mU*mAmUmGmUmGmAfAfCfAmCmUmGmUmGmAmCmC*mC*mAP |
| | SEQ ID NO: 585 | mU*fG*fGmGmUmCfAmCmAmGmUmGmUfUmCfAmCmAmUmAmC*mA*mG |

P indicates a 5′ phosphate;
m indicates 2′O-methyl modified ribose on the listed nucleotide;
f indicates 2′F modified ribose on the listed nucleotide;
*indicates a phosphorothioate bond (in place of a phosphodiester bond);
GNA indicates a glycol nucleic acid nucleotide;
(AP) means an apurinic/apyrimidinic residue, also called an abasic residue.

TABLE 4B
FAS-GalNAc RNAi agents, modified sense and antisense strands

| Duplex | SEQ ID NO: | Modified Sequence |
|---|---|---|
| D: | SEQ ID NO: 586 | mG*mA*mUmGmAmAfGmGfAfCfAmUmGmGmCmUmUmAmG*mA*mA |
| 241 | SEQ ID NO: 587 | mU*fU*mCmUmAfAmGmCmCmAmUmGmUfCmCfUmUmCmAmUmC*mA*mC |
| D: | SEQ ID NO: 588 | mU*mA*mAmAmCmCfAmAfAfCfUmUmUmUmUmUmUmGmU*mA*mA |
| 242 | SEQ ID NO: 589 | mU*fU*mAmCmAfAmAmAmAmAmAmGmUfUmUfGmGmUmUmUmA*mC*mA |
| D: | SEQ ID NO: 590 | mG*mA*mAmGmAmUfGmUfAfGfAmUmUmGmUmGmUmGmA*mU*mA |
| 243 | SEQ ID NO: 591 | mU*fAmUmCmAfCmAmCmAmAmUmCmUfAmCfAmUmCmUmUmC*mU*mG |
| D: | SEQ ID NO: 592 | mG*mU*mUmGmAmCfUmUfGfAfGmUmAmAmAmUmAmUmA*mU*mA |
| 244 | SEQ ID NO: 593 | mU*fA*mUmAmUfAmUmUmUmAmCmUmCfAmAfGmUmCmAmAmC*mA*mU |
| D: | SEQ ID NO: 594 | mA*mU*mCmAmAmGfAmAfUfGfAmCmAmAmUmGmUmCmC*mA*mA |
| 245 | SEQ ID NO: 595 | mU*fU*mGmGmAfCmAmUmUmGmUmCmAfUmUfCmUmUmGmAmU*mC*mU |
| D: | SEQ ID NO: 596 | mU*mG*mUmUmGmAfCmUfUfGfAmGmUmAmAmAmUmAmU*mA*mA |
| 246 | SEQ ID NO: 597 | mU*fU*mAmUmAfUmUmUmAmCmUmCmAfAmGfUmCmAmAmCmA*mU*mC |
| D: | SEQ ID NO: 598 | mG*mC*mCmAmAmAfAmUfAfGfAmUmGmAmGmAmUmCmA*mA*mA |
| 247 | SEQ ID NO: 599 | mU*fU*mUmGmAfUmCmUmCmAmUmCmUfAmUfUmUmUmGmGmC*mU*mU |
| | SEQ ID NO: 600 | mA*mA*mUmGmCmAfGmAfAfGfAmUmGmUmAmGmAmUmU*mG*mA |
| D: | SEQ ID NO: 601 | mU*fC*mAmAmUfCmUmAmCmAmUmCmUfUmCfUmGmCmAmUmU*mU*mG |
| 248 | | |
| D: | SEQ ID NO: 602 | mG*mC*mUmUmUmGfUmUfCfGfAmAmAmGmAmAmUmGmG*mU*mA |
| 249 | SEQ ID NO: 603 | mU*fA*mCmCmAfUmUmCmUmUmUmCmGfAmAfCmAmAmAmGmC*mC*mU |
| D: | SEQ ID NO: 604 | mG*mA*mCmUmUmGfAmGfUfAfAmAmUmAmUmAmUmCmA*mC*mA |
| 250 | SEQ ID NO: 605 | mU*fG*mUmGmAfUmAmUmAmUmUmUmAfCmUfCmAmAmGmUmC*mA*mA |
| D: | SEQ ID NO: 606 | mA*mG*mAmUmGmAfGmAfUfCfAmAmGmAmAmUmGmAmC*mA*mA |
| 251 | SEQ ID NO: 607 | mU*fU*mGmUmCfAmUmUmCmUmUmGmAfUmCfUmCmAmUmCmU*mA*mU |
| D: | SEQ ID NO: 608 | mU*mU*mGmAmGmUfAmAfAfUfAmUmAmUmCmAmCmCmA*mC*mA |
| 252 | SEQ ID NO: 609 | mU*fG*mUmGmGfUmGmAmUmAmUmAmUfUmUfAmCmUmCmAmA*mG*mU |
| D: | SEQ ID NO: 610 | mA*mA*mUmAmGmAfUmGfAfGfAmUmCmAmAmGmAmAmU*mG*mA |
| 253 | SEQ ID NO: 611 | mU*fC*mAmUmUfCmUmUmGmAmUmCmUfCmAfUmCmUmAmUmU*mU*mU |
| D: | SEQ ID NO: 612 | mC *mUmUmUmGmUfUmCfGfAfAmAmGmAmAmUmGmGmU*mG*mA |
| 254 | SEQ ID NO: 613 | mU*fC*mAmCmCfAmUmUmCmUmUmUmCfGmAfAmCmAmAmAmG*mC*mC |
| D: | SEQ ID NO: 614 | mU*mG*mUmGmAmUfGmAfAfGfGmAmCmAmUmGmGmCmU*mU*mA |
| 255 | SEQ ID NO: 615 | mU*fA*mAmGmCfCmAmUmGmUmCmCmUfUmCfAmUmCmAmCmA*mC*mA |
| D: | SEQ ID NO: 616 | mUmG*mAmCmUmUfGmAfGfUfAmAmAmUmAmUmAmUmC*mA*mA |
| 256 | SEQ ID NO: 617 | mU*fU*mGmAmUfAmUmAmUmUmUmAmCfUmCfAmAmGmUmCmA*mA*mC |
| D: | SEQ ID NO: 618 | mG*mA*mAmAmGmUfUmCfAfAfCmUmGmCmUmUmCmGmU*mA*mA |
| 257 | SEQ ID NO: 619 | mU*fU*mAmCmGfAmAmGmCmAmGmUmUfGmAfAmCmUmUmUmC*mU*mG |
| D: | SEQ ID NO: 620 | mG*mC*mAmGmAmAfGmAfUfGfUmAmGmAmUmUmGmUmG*mU*mA |
| 258 | SEQ ID NO: 621 | mU*fAmCmAmCfAmAmUmCmUmAmCmAfUmCfUmUmCmUmGmC*mA*mU |
| D: | SEQ ID NO: 622 | mU*mG*mUmGmAmAfCmAfCfUfGmUmGmAmCmCmCmUmUmG*mA |
| 259 | SEQ ID NO: 623 | mU*C*mAmAmGfGmGmUmCmAmCmAmGfUmGfUmUmCmAmCmA*mU*mA |
| D: | SEQ ID NO: 624 | mG*mA*mCmAmCmUfAmAfGfUfCmAmAmGmUmUmAmAmA*mG*mA |
| 260 | SEQ ID NO: 625 | mU*fC*mUmUmUfAmAmCmUmUmGmAmCfUmUfAmGmUmGmUmC*mA*mU |
| D: | SEQ ID NO: 626 | mG*mA*mAmUmAmCfCmAfAfGfUmGmCmAmGmAmUmGmU*mA*mA |
| 261 | SEQ ID NO: 627 | mU*fU*mAmCmAfUmCmUmGmCmAmCmUfUmGfGmUmAmUmUmC*mU*mG |
| D: | SEQ ID NO: 628 | mG*mA*mCmAmAmUfGmUfCfCfAmAmGmAmCmAmCmAmG*mC*mA |
| 262 | SEQ ID NO: 629 | mU*fG*mCmUmGfUmGmUmCmUmUmGmGfAmCfAmUmUmGmUmC*mA*mU |
| D: | SEQ ID NO: 630 | mA*mU*mGmAmAmGfGmAfCfAfUmGmGmCmUmUmAmGmA*mA*mA |
| 263 | SEQ ID NO: 631 | mU*fU*mUmCmUfAmAmGmCmCmAmUmGfUmCfCmUmUmCmAmU*mC*mA |
| D: | SEQ ID NO: 632 | mU*mU*mCmCmAmAfAmUfGfCfAmGmAmAmGmAmUmGmU*mA*mA |
| 264 | SEQ ID NO: 633 | mU*fU*mAmCmAfUmCmUmUmCmUmGmCfAmUfUmUmGmGmAmA*mG*mA |
| D: | SEQ ID NO: 634 | mG*mA*mGmAmUmCfAmAfGfAfAmUmGmAmCmAmAmUmG*mU*mA |
| 265 | SEQ ID NO: 635 | mU*fA*mCmAmUfUmGmUmCmAmUmUmCfUmUfGmAmUmCmUmC*mA*mU |
| D: | SEQ ID NO: 636 | mC*mA*mAmGmUmGfCmAfGfAfUmGmUmAmAmAmCmCmA*mA*mA |
| 266 | SEQ ID NO: 637 | mU*fU*mUmGmGfUmUmUmAmCmAmUmCfUmGfCmAmCmUmUmG*mG*mU |
| D: | SEQ ID NO: 638 | mU*mU*mUmGmUmUfCmGfAfAfAmGmAmAmUmGmGmUmG*mU*mA |
| 267 | SEQ ID NO: 639 | mU*A*mCmAmCfCmAmUmUmCmUmUmUfCmGfAmAmCmAmAmA*mG*mC |
| D: | SEQ ID NO: 640 | mC*mA*mGmAmAmGfAmUfGfUfAmGmAmUmUmGmUmGmU*mG*mA |
| 268 | SEQ ID NO: 641 | mU*fC*mAmCmAfCmAmAmUmCmUmAmCfAmUfCmUmUmCmUmG*mC*mA |
| D: | SEQ ID NO: 642 | mU*mC*mUmUmUmGfUmAfCfUfCmUmUmGmCmAmGmAmG*mA*mA |
| 269 | SEQ ID NO: 643 | mU*fU*mCmUmCfUmGmCmAmAmGmAmGfUmAfCmAmAmAmGmA*mU*mU |
| D: | SEQ ID NO: 644 | mC *mA*mCmUmGmUfGmAfCfCfCmUmUmGmCmAmCmCmA*mA*mA |
| 270 | SEQ ID NO: 645 | mU*fUmUmGmGfUmGmCmAmAmGmGmGfUmCfAmCmAmGmUmG*mU*mU |
| D: | SEQ ID NO: 646 | mU*mC*mCmAmAmAfUmGfCFAfGmAmAmGmAmUmGmUmA*mG*mA |
| 271 | SEQ ID NO: 647 | mU*fC*mUmAmCfAmUmCmUmUmCmUmGfCmAfUmUmUmGmGmA*mA*mG |
| D: | SEQ ID NO: 648 | mA*mA*mUmGmUmCfCmAfAfGfAmCmAmCmAmGmCmAmG*mA*mA |
| 272 | SEQ ID NO: 649 | mU*fU*mCmUmGfCmUmGmUmGmUmCmUfUmGfGmAmCmAmUmU*mG*mU |
| D: | SEQ ID NO: 650 | mG*mC*mCmAmAmGfAmAfGfGfGmAmAmGmGmAmGmUmA*mC*mA |
| 273 | SEQ ID NO: 651 | mU*fG*mUmAmCfUmCmCmUmUmCmCmCfUmUfCmUmUmGmGmC*mA*mG |
| D: | SEQ ID NO: 652 | mC*mU*mUmGmAmGfUmAfAfAfUmAmUmAmUmCmAmCmC*mA*mA |
| 274 | SEQ ID NO: 653 | mU*fU*mGmGmUfGmAmUmAmUmAmUmUfUmAfCmUmCmAmAmG*mU*mC |
| D: | SEQ ID NO: 654 | mU*mA*mGmAmUmGfAmGfAfUfCmAmAmGmAmAmUmGmA*mC*mA |
| 275 | SEQ ID NO: 655 | mU*G*mUmCmAfUmUmCmUmUmGmAmUfCmUfCmAmUmCmUmA*mU*mU |
| D: | SEQ ID NO: 656 | mU*mU*mGmAmCmUfUmGfAfGfUmAmAmAmUmAmUmAmU*mC*mA |
| 276 | SEQ ID NO: 657 | mU*fG*mAmUmAfUmAmUmUmUmAmCmUfCmAfAmGmUmCmAmA*mC*mA |
| D: | SEQ ID NO: 658 | mA*mG*mUmAmAmAfUmAfUfAfUmCmAmCmCmAmCmUmA*mU*mA |
| 277 | SEQ ID NO: 659 | mU*fA*mUmAmGfUmGmGmUmGmAmUmAfUmAfUmUmUmAmCmU*mC*mA |
| D: | SEQ ID NO: 660 | mU*mA*mCmCmAmAfGmUfGfCfAmGmAmUmGmUmAmAmA*mC*mA |
| 278 | SEQ ID NO: 661 | mU*FG*mUmUmUfAmCmAmUmCmUmGmCfAmCfUmUmGmGmUmA*mU*mU |
| D: | SEQ ID NO: 662 | mC *mU*mGmUmAmUfGmUfGfAfAmCmAmCmUmGmUmGmA*mC*mA |
| 279 | SEQ ID NO: 663 | mU*fG*mUmCmAfCmAmGmUmGmUmUmCfAmCfAmUmAmCmAmG*mU*mA |
| D: | SEQ ID NO: 664 | mG*mA*mUmCmAmAfGmAfAfUfGmAmCmAmAmUmGmUmC*mC*mA |
| 280 | SEQ ID NO: 665 | mU*FG*mGmAmCfAmUmUmGmUmCmAmUfUmCfUmUmGmAmUmC*mU*mC |
| D: | SEQ ID NO: 666 | mA*mU*mGmAmCmAfCmUfAfAfGmUmCmAmAmGmUmUmA*mA*mA |
| 281 | SEQ ID NO: 667 | mU*U*mUmAmAfCmUmUmGmAmCmUmUfAmGfUmGmUmCmAmU*mG*mA |
| D: | SEQ ID NO: 668 | mA*mA*mAmUmAmGfAmUfGfAfGmAmUmCmAmAmGmAmA*mU*mA |
| 282 | SEQ ID NO: 669 | mU*A*mUmUmCfUmUmGmAmUmCmUmCfAmUfCmUmAmUmUmU*mU*mG |
| D: | SEQ ID NO: 670 | mG*mU*mAmUmGmUfGmAfAfCfAmCmUmGmUmGmAmCmC*mC*mA |
| 283 | SEQ ID NO: 671 | mU*fG*mGmGmUfCmAmCmAmGmUmGmUfUmCfAmCmAmUmAmC*mA*mG |
| D: | SEQ ID NO: 672 | mA*mA*mUmAmCmCfAmAfGfUfGmCmAmGmAmUmGmUmA*mA*mA |
| 284 | SEQ ID NO: 673 | mU*fU*mUmAmCfAmUmCmUmGmCmAmCfUmUfGmGmUmAmUmU*mC*mU |
| D: | SEQ ID NO: 674 | mU*mG*mAmGmAmUfCmAfAfGfAmAmUmGmAmCmAmAmU*mG*mA |
| 285 | SEQ ID NO: 675 | mU*fC*mAmUmUfGmUmCmAmUmUmCmUfUmGfAmUmCmUmCmA*mU*mC |
| D: | SEQ ID NO: 676 | mC *mU*mUmUmGmUfAmCfUfCfUmUmGmCmAmGmAmGmA*mA*mA |
| 286 | SEQ ID NO: 677 | mU*fU*mUmCmUfCmUmGmCmAmAmGmAfGmUfAmCmAmAmAmG*mA*mU |
| D: | SEQ ID NO: 678 | mU*mG*mAmAmGmCfCmAfAfAfAmUmAmGmAmUmGmAmG*mA*mA |
| 287 | SEQ ID NO: 679 | mU*fU*mCmUmCfAmUmCmUmAmUmUmUfUmGfGmCmUmUmCmA*mU*mU |
| D: | SEQ ID NO: 680 | mC*mA*mUmCmCmUfCmAfAfGfGmAmCmAmUmUmAmCmU*mA*mA |
| 288 | SEQ ID NO: 681 | mU*fU*mAmGmUfAmAmUmGmUmCmCmUfUmGfAmGmGmAmUmG*mA*mU |
| D: | SEQ ID NO: 682 | mU*mA*mUmGmUmGfAmAfCfAfCmUmGmUmGmAmCmCmC*mU*mA |
| 289 | SEQ ID NO: 683 | mU*fA*mGmGmGfUmCmAmCmAmGmUmGfUmUfCmAmCmAmUmA*mC*mA |
| D: | SEQ ID NO: 684 | mG*mUmGmUmUmAfAmUfGfCfCmCmAmAmGmUmGmAmC*mU*mA |
| 290 | SEQ ID NO: 685 | mU*fA*mGmUmCfAmCmUmUmGmGmGmCfAmUfUmAmAmCmAmC*mU*mU |
| D: | SEQ ID NO: 686 | mU*mU*mCmAmAmCfUmGfCfUfUmCmGmUmAmAmUmUmG*mG*mA |
| 291 | SEQ ID NO: 687 | mU*fC*mCmAmAfUmUmAmCmGmAmAmGfCmAfGmUmUmGmAmA*mC*mU |
| D: | SEQ ID NO: 688 | mU*mG*mCmAmGmAfAmGfAfUfGmUmAmGmAmUmUmGmU*mG*mA |
| 292 | SEQ ID NO: 689 | mU*fC*mAmCmAfAmUmCmUmAmCmAmUfCmUfUmCmUmGmCmA*mU*mU |
| D: | SEQ ID NO: 690 | mG*mA*mGmUmAmAfAmUfAfUfAmUmCmAmCmCmAmCmU*mA*mA |
| 293 | SEQ ID NO: 691 | mU*fU*mAmGmUfGmGmUmGmAmUmAmUfAmUfUmUmAmCmUmC*mA*mA |
| D: | SEQ ID NO: 692 | mC*mA*mAmGmGmAfAmUfGfCfAmCmAmCmUmCmAmCmC*mA*mA |
| 294 | SEQ ID NO: 693 | mU*FU*mGmGmUfGmAmGmUmGmUmGmCfAmUfUmCmCmUmUmG*mA*mU |
| D: | SEQ ID NO: 694 | mC*mA*mGmGmUmGfAmAfAfGfGmAmAmAmGmCmUmAmG*mG*mA |
| 295 | SEQ ID NO: 695 | mU*fC*mCmUmAfGmCmUmUmUmCmCmUfUmUfCmAmCmCmUmG*mG*mA |
| D: | SEQ ID NO: 696 | mA*mA*mUmGmAmCfAmAfUfGfUmCmCmAmAmGmAmCmA*mC*mA |
| 296 | SEQ ID NO: 697 | mU*fG*mUmGmUfCmUmUmGmGmAmCmAfUmUfGmUmCmAmUmU*mC*mU |
| D: | SEQ ID NO: 698 | mG*mG*mAmAmUmGfCmAfCfAfCmUmCmAmCmCmAmGmC*mA*mA |
| 297 | SEQ ID NO: 699 | mU*fU*mGmCmUfGmGmUmGmAmGmUmGfUmGfCmAmUmUmCmC*mU*mU |
| D: | SEQ ID NO: 700 | mC*mC *mUmGmUmCfCmUfCfCfAmGmGmUmGmAmAmAmG*mG*mA |
| 298 | SEQ ID NO: 701 | mU*fC*mCmUmUfUmCmAmCmCmUmGmGfAmGfGmAmCmAmGmG*mG*mC |
| D: | SEQ ID NO: 702 | mA*mU*mGmCmAmGfAmAfGfAfUmGmUmAmGmAmUmUmG*mU*mA |
| 299 | SEQ ID NO: 703 | mU*A*mCmAmAfUmCmUmAmCmAmUmCfUmUfCmUmGmCmAmU*mU*mU |
| D: | SEQ ID NO: 704 | mU*mU*mGmUmGmUfGmAfUfGfAmAmGmGmAmCmAmUmG*mG*mA |
| 300 | SEQ ID NO: 705 | mU*fC*mCmAmUfGmUmCmCmUmUmCmAfUmCfAmCmAmCmAmA*mU*mC |
| D: | SEQ ID NO: 706 | mA*mA*mAmGmUmUfCmAfAfCfUmGmCmUmUmCmGmUmA*mA*mA |
| 301 | SEQ ID NO: 707 | mU*fU*mUmAmCfGmAmAmGmCmAmGmUfUmGfAmAmCmUmUmU*mC*mU |
| D: | SEQ ID NO: 708 | mU*mG*mUmUmAmAfUmGfCfCfCmAmAmGmUmGmAmCmU*mG*mA |
| 302 | SEQ ID NO: 709 | mU*fC*mAmGmUfCmAmCmUmUmGmGmGfCmAfUmUmAmAmCmA*mC*mU |
| D: | SEQ ID NO: 710 | mG*mA*mUmGmUmUfGmAfCfUfUmGmAmGmUmAmAmAmU*mA*mA |
| 303 | SEQ ID NO: 711 | mU*fU*mAmUmUfUmAmCmUmCmAmAmGfUmCfAmAmCmAmUmC*mA*mG |
| D: | SEQ ID NO: 712 | mG*mA*mAmGmCmCfAmAfAfAfUmAmGmAmUmGmAmGmA*mU*mA |
| 304 | SEQ ID NO: 713 | mU*fA*mUmCmUfCmAmUmCmUmAmUmUfUmUfGmGmCmUmUmC*mA*mU |
| D: | SEQ ID NO: 714 | mG*mU*mUmCmAmAfCmUfGfCfUmUmCmGmUmAmAmUmU*mG*mA |
| 305 | SEQ ID NO: 715 | mU*C*mAmAmUfUmAmCmGmAmAmGmCfAmGfUmUmGmAmAmC*mU*mU |
| D: | SEQ ID NO: 716 | mG*mU*mAmCmUmCfUmUfGfCfAmGmAmGmAmAmAmAmU*mU*mA |
| 306 | SEQ ID NO: 717 | mU*fA*mAmUmUfUmUmCmUmCmUmGmCfAmAfGmAmGmUmAmC*mA*mA |
| D: | SEQ ID NO: 718 | mC *mU*mCmAmAmGfGmAfCfAfUmUmAmCmUmAmGmUmG*mA*mA |
| 307 | SEQ ID NO: 719 | mU*fU*mCmAmCfUmAmGmUmAmAmUmGfUmCfCmUmUmGmAmG*mG*mA |
| D: | SEQ ID NO: 720 | mA*mG*mGmGmAmAfGmGfAfGfUmAmCmAmCmAmGmAmC*mA*mA |
| 308 | SEQ ID NO: 721 | mU*fU*mGmUmCfUmGmUmGmUmAmCmUfCmCfUmUmCmCmCmU*mU*mC |
| D: | SEQ ID NO: 722 | mUmC*mAmUmGmAfCmAfCfUfAmAmGmUmCmAmAmGmU*mU*mA |
| 309 | SEQ ID NO: 723 | mU*fA*mAmCmUfUmGmAmCmUmUmAmGfUmGfUmCmAmUmGmA*mC*mU |
| D: | SEQ ID NO: 724 | mC*mC*mUmCmAmAfGmGfAfCfAmUmUmAmCmUmAmGmU*mG*mA |
| 310 | SEQ ID NO: 725 | mU*fC*mAmCmUfAmGmUmAmAmUmGmUfCmCfUmUmGmAmGmG*mA*mU |
| D: | SEQ ID NO: 726 | mG*mG*mCmUmUmUfGmUfUfCfGmAmAmAmGmAmAmUmG*mG*mA |
| 311 | SEQ ID NO: 727 | mU*fC*mCmAmUfUmCmUmUmUmCmGmAfAmCfAmAmAmGmCmC*mU*mU |
| D: | SEQ ID NO: 728 | mC*mC*mAmGmAmCfUmGfCfGfUmGmCmCmCmUmGmCmC*mA*mA |
| 312 | SEQ ID NO: 729 | mU*fU*mGmGmCfAmGmGmGmCmAmCmGfCmAfGmUmCmUmGmG*mU*mU |
| D: | SEQ ID NO: 730 | mA*mG*mCmCmAmAfAmAfUfAfGmAmUmGmAmGmAmUmC*mA*mA |
| 313 | SEQ ID NO: 731 | mU*fU*mGmAmUfCmUmCmAmUmCmUmAfUmUfUmUmGmGmCmU*mU*mC |
| D: | SEQ ID NO: 732 | mA*mG*mAmAmGmGfGmAfAfGfGmAmGmUmAmCmAmCmA*mG*mA |
| 314 | SEQ ID NO: 733 | mU*fC*mUmGmUfGmUmAmCmUmCmCmUfUmCfCmCmUmUmCmU*mU*mG |
| D: | SEQ ID NO: 734 | mA*mG*mAmUmUmGfUmGfUfGfAmUmGmAmAmGmGmAmC*mA*mA |
| 315 | SEQ ID NO: 735 | mU*fU*mGmUmCfCmUmUmCmAmUmCmAfCmAfCmAmAmUmCmU*mA*mC |
| D: | SEQ ID NO: 736 | mU*mU*mUmCmAmCfUmUfCfGfGmAmGmGmAmUmUmGmC*mU*mA |
| 316 | SEQ ID NO: 737 | mU*fA*mGmCmAfAmUmCmCmUmCmCmGfAmAfGmUmGmAmAmA*mG*mA |
| D: | SEQ ID NO: 738 | mA*mA*mGmGmAmAfAmGfCfUfAmGmGmGmAmCmUmGmC*mA*mA |
| 317 | SEQ ID NO: 739 | mU*fU*mGmCmAfGmUmCmCmCmUmAmGfCmUfUmUmCmCmUmU*mU*mC |
| D: | SEQ ID NO: 740 | mG*mA*mCmAmUmGfGmCfUfUfAmGmAmAmGmUmGmGmA*mA*mA |
| 318 | SEQ ID NO: 741 | mU*fU*mUmCmCfAmCmUmUmCmUmAmAfGmCfCmAmUmGmUmC*mC*mU |
| D: | SEQ ID NO: 742 | mU*mG*mUmAmCmUfCmUfUfGfCmAmGmAmGmAmAmAmA*mU*mA |
| 319 | SEQ ID NO: 743 | mU*fA*mUmUmUfUmCmUmCmUmGmCmAfAmGfAmGmUmAmCmA*mA*mA |
| D: | SEQ ID NO: 744 | mA*mUmGmAmAmCfCmAfGfAfCmUmGmCmGmUmGmCmC*mC*mA |
| 320 | SEQ ID NO: 745 | mU*fG*mGmGmCfAmCmGmCmAmGmUmCfUmGfGmUmUmCmAmU*mC*mC |
| D: | SEQ ID NO: 746 | mC*mA*mUmGmAmCfAmCfUfAfAmGmUmCmAmAmGmUmU*mA*mA |
| 321 | SEQ ID NO: 747 | mU*fU*mAmAmCfUmUmGmAmCmUmUmAfGmUfGmUmCmAmUmG*mA*mC |
| D: | SEQ ID NO: 748 | mU*mU*mGmUmUmCfGmAfAfAfGmAmAmUmGmGmUmGmU*mC*mA |
| 322 | SEQ ID NO: 749 | mU*fG*mAmCmAfCmCmAmUmUmCmUmUfUmCfGmAmAmCmAmA*mA*mG |
| D: | SEQ ID NO: 750 | mA*mC*mAmCmUmGfUmGfAfCfCmCmUmUmGmCmAmCmC*mA*mA |
| 323 | SEQ ID NO: 751 | mU*fU*mGmGmUfGmCmAmAmGmGmGmUfCmAfCmAmGmUmGmU*mU*mC |
| D: | SEQ ID NO: 752 | mG*mG*mAmAmAmUfAmAfAfCfUmGmCmAmCmCmCmGmG*mA*mA |
| 324 | SEQ ID NO: 753 | mU*fU*mCmCmGfGmGmUmGmCmAmGmUfUmUfAmUmUmUmCmC*mA*mC |
| D: | SEQ ID NO: 754 | mA*mA*mGmUmGmUfUmAfAfUfGmCmCmCmAmAmGmUmG*mA*mA |
| 325 | SEQ ID NO: 755 | mU*fU*mCmAmCfUmUmGmGmGmCmAmUfUmAfAmCmAmCmUmU*mU*mU |
| D: | SEQ ID NO: 756 | mA*mG*mUmUmCmAfAmCfUfGfCmUmUmCmGmUmAmAmU*mU*mA |
| 326 | SEQ ID NO: 757 | mU*fA*mAmUmUfAmCmGmAmAmGmCmAfGmUfUmGmAmAmCmU*mU*mU |
| D: | SEQ ID NO: 758 | mC*mA*mCmUmUmCfGmGfAfGfGmAmUmUmGmCmUmCmA*mA*mA |
| 327 | SEQ ID NO: 759 | mU*FU*mUmGmAfGmCmAmAmUmCmCmUfCmCfGmAmAmGmUmG*mA*mA |
| D: | SEQ ID NO: 760 | mA*mUmGmAmAmGfCmCfAfAfAmAmUmAmGmAmUmGmA*mG*mA |
| 328 | SEQ ID NO: 761 | mU*fC*mUmCmAfUmCmUmAmUmUmUmUfGmGfCmUmUmCmAmU*mU*mG |
| D: | SEQ ID NO: 762 | mA*mC*mUmUmCmGfGmAfGfGfAmUmUmGmCmUmCmAmA*mC*mA |
| 329 | SEQ ID NO: 763 | mU*fG*mUmUmGfAmGmCmAmAmUmCmCfUmCfCmGmAmAmGmU*mG*mA |
| D: | SEQ ID NO: 764 | mA*mG*mGmUmGmAfAmAfGfGfAmAmAmGmCmUmAmGmG*mG*mA |
| 330 | SEQ ID NO: 765 | mU*fC*mCmCmUfAmGmCmUmUmUmCmCfUmUfUmCmAmCmCmU*mG*mG |
| D: | SEQ ID NO: 766 | mA*mA*mGmGmGmAfAmGfGfAfGmUmAmCmAmCmAmGmA*mC*mA |
| 331 | SEQ ID NO: 767 | mU*fG*mUmCmUfGmUmGmUmAmCmUmCfCmUfUmCmCmCmUmU*mC*mU |
| D: | SEQ ID NO: 768 | mA*mG*mUmGmGmAfAmAfUfAfAmAmCmUmGmCmAmCmC*mC*mA |
| 332 | SEQ ID NO: 769 | mU*fG*mGmGmUfGmCmAmGmUmUmUmAfUmUfUmCmCmAmCmU*mU*mC |
| D: | SEQ ID NO: 770 | mA*mU*mGmAmCmAfAmUfGfUfCmCmAmAmGmAmCmAmC*mA*mA |
| 333 | SEQ ID NO: 771 | mU*fU*mGmUmGfUmCmUmUmGmGmAmCfAmUfUmGmUmCmAmU*mU*mC |
| D: | SEQ ID NO: 772 | mG*mA*mUmUmGmUfGmUfGfAfUmGmAmAmGmGmAmCmA*mU*mA |
| 334 | SEQ ID NO: 773 | mU*fA*mUmGmUfCmCmUmUmCmAmUmCfAmCfAmCmAmAmUmC*mU*mA |
| D: | SEQ ID NO: 774 | mG*mG*mGmGmAmUfGmAfAfCfCmAmGmAmCmUmGmCmG*mU*mA |
| 335 | SEQ ID NO: 775 | mU*fA*mCmGmCfAmGmUmCmUmGmGmUfUmCfAmUmCmCmCmC*mA*mU |
| D: | SEQ ID NO: 776 | mG*mU*mUmAmAmUfGmCfCfCfAmAmGmUmGmAmCmUmG*mA*mA |
| 336 | SEQ ID NO: 777 | mU*U*mCmAmGfUmCmAmCmUmUmGmGfGmCfAmUmUmAmAmC*mA*mC |
| D: | SEQ ID NO: 778 | mA*mC*mCmAmGmAfCmUfGfCfGmUmGmCmCmCmUmGmC*mC*mA |
| 337 | SEQ ID NO: 779 | mU*FG*mGmCmAfGmGmGmCmAmCmGmCfAmGfUmCmUmGmGmU*mU*mC |
| D: | SEQ ID NO: 780 | mA*mA*mCmAmCmUfGmUfGfAfCmCmCmUmUmGmCmAmC*mC*mA |
| 338 | SEQ ID NO: 781 | mU*fG*mGmUmGfCmAmAmGmGmGmUmCfAmCfAmGmUmGmUmU*mC*mA |
| D: | SEQ ID NO: 782 | mG*mG*mAmAmGmGfAmGfUfAfCmAmCmAmGmAmCmAmA*mA*mA |
| 339 | SEQ ID NO: 783 | mU*fU*mUmUmGfUmCmUmGmUmGmUmAfCmUfCmCmUmUmCmC*mC*mU |
| D: | SEQ ID NO: 784 | mG*mG*mGmAmUmGfAmAfCfCfAmGmAmCmUmGmCmGmU*mG*mA |
| 340 | SEQ ID NO: 785 | mU*fC*mAmCmGfCmAmGmUmCmUmGmGfUmUfCmAmUmCmCmC*mC*mA |
| D: | SEQ ID NO: 786 | mC *mU*mGmCmGmUfGmCfCfCfUmGmCmCmAmAmGmAmA*mG*mA |
| 341 | SEQ ID NO: 787 | mU*C*mUmUmCfUmUmGmGmCmAmGmGfGmCfAmCmGmCmAmG*mU*mC |
| D: | SEQ ID NO: 788 | mU*mG*mAmAmCmAfCmUfGfUfGmAmCmCmCmUmUmGmC*mA*mA |
| 342 | SEQ ID NO: 789 | mU*fU*mGmCmAfAmGmGmGmUmCmAmCfAmGfUmGmUmUmCmA*mC*mA |
| D: | SEQ ID NO: 790 | mA*mG*mGmAmUmUfGmCfUfCfAmAmCmAmAmCmCmAmU*mG*mA |
| 343 | SEQ ID NO: 791 | mU*C*mAmUmGfGmUmUmGmUmUmGmAfGmCfAmAmUmCmCmU*mC*mC |
| D: | SEQ ID NO: 792 | mUmG*mAmCmAmCfUmAfAfGfUmCmAmAmGmUmUmAmA*mA*mA |
| 344 | SEQ ID NO: 793 | mU*fU*mUmUmAfAmCmUmUmGmAmCmUfUmAfGmUmGmUmCmA*mU*mG |
| D: | SEQ ID NO: 794 | mU*mG*mAmAmAmGfGmAfAfAfGmCmUmAmGmGmGmAmC*mU*mA |
| 345 | SEQ ID NO: 795 | mU*fA*mGmUmCfCmCmUmAmGmCmUmUfUmCfCmUmUmUmCmA*mC*mC |
| D: | SEQ ID NO: 796 | mA*mC*mAmAmUmGfUmCfCfAfAmGmAmCmAmCmAmGmC*mA*mA |
| 346 | SEQ ID NO: 797 | mU*fU*mGmCmUfGmUmGmUmCmUmUmGfGmAfCmAmUmUmGmU*mC*mA |
| D: | SEQ ID NO: 798 | mG*mUmGmAmAmAfGmGfAfAfAmGmCmUmAmGmGmGmA*mC*mA |
| 347 | SEQ ID NO: 799 | mU*fG*mUmCmCfCmUmAmGmCmUmUmUfCmCfUmUmUmCmAmC*mC*mU |
| D: | SEQ ID NO: 800 | mA*mG*mCmUmCmUfUmUfCfAfCmUmUmCmGmGmAmGmG*mA*mA |
| 348 | SEQ ID NO: 801 | mU*fU*mCmCmUfCmCmGmAmAmGmUmGfAmAfAmGmAmGmCmU*mU*mC |
| D: | SEQ ID NO: 802 | mU*mU*mCmUmUmCfCmAfAfAfUmGmCmAmGmAmAmGmA*mU*mA |
| 349 | SEQ ID NO: 803 | mU*fA*mUmCmUfUmCmUmGmCmAmUmUfUmGfGmAmAmGmAmA*mA*mA |
| D: | SEQ ID NO: 804 | mG*mG*mAmGmGmAfUmUfGfCfUmCmAmAmCmAmAmCmC*mA*mA |
| 350 | SEQ ID NO: 805 | mU*fU*mGmGmUfUmGmUmUmGmAmGmCfAmAfUmCmCmUmCmC*mG*mA |
| D: | SEQ ID NO: 806 | mU*mG*mCmCmAmAfGmAfAfGfGmGmAmAmGmGmAmGmU*mA*mA |
| 351 | SEQ ID NO: 807 | mU*fU*mAmCmUfCmCmUmUmCmCmCmUfUmCfUmUmGmGmCmA*mG*mG |
| D: | SEQ ID NO: 808 | mG*mA*mAmAmGmUfUmCFA-(AP)-fCmUmGmCmUmUmCmGmU*mA*mA |
| 352 | SEQ ID NO: 562 | mU*U*mAmCmGmAmAmGmCmAmGmUmUfGmAfAmCmUmUmUmC*mU*mG |
| D: | SEQ ID NO: 808 | mG*mA*mAmAmGmUfUmCFA-(AP)-fCmUmGmCmUmUmCmGmU*mA*mA |
| 353 | SEQ ID NO: 563 | mU*fU*mAmCfGmAfAmGmCmAmGmUmUfGmAfAmCmUmUmUmC*mU*mG |
| D: | SEQ ID NO: 808 | mG*mA*mAmAmGmUfUmCfA-(AP)-fCmUmGmCmUmUmCmGmU*mA*mA |
| 354 | SEQ ID NO: 571 | mU*fU*fAmCmGmAfAmGmCmAmGmUmUfGmAfAmCmUmUmUmC*mU*mG |
| D: | SEQ ID NO: 809 | mG*mA*mAmAmGmUmUmCfAfAfCmUmGmCmUmUmCmGmU*mA*mA |
| 355 | SEQ ID NO: 563 | mU*fU*mAmCfGmAfAmGmCmAmGmUmUfGmAfAmCmUmUmUmC*mU*mG |
| D: | SEQ ID NO: 809 | mG*mA*mAmAmGmUmUmCfAfAfCmUmGmCmUmUmCmGmU*mA*mA |
| 356 | SEQ ID NO: 571 | mU*fU*fAmCmGmAfAmGmCmAmGmUmUfGmAfAmCmUmUmUmC*mU*mG |
| D: | SEQ ID NO: 810 | mG*mU*mUmGmAmCfUmUfG-(AP)-fGmUmAmAmAmUmAmUmA*mU*mA |
| 357 | SEQ ID NO: 566 | mU*fA*mUmAfUmAfUmUmUmAmCmUmCfAmAfGmUmCmAmAmC*mA*mU |
| D: | SEQ ID NO: 810 | mG*mUmUmGmAmCfUmUfG-(AP )-fGmUmAmAmAmUmAmUmA*mU*mA |
| 358 | SEQ ID NO: 567 | mU*A*fUmAmUmAfUmUmUmAmCmUmCfAmAfGmUmCmAmAmC*mA*mU |
| D: | SEQ ID NO: 811 | mG*mU*mUmGmAmCmUmUfGfAfGmUmAmAmAmUmAmUmA*mU*mA |
| 359 | SEQ ID NO: 566 | mU*fA*mUmAfUmAfUmUmUmAmCmUmCfAmAfGmUmCmAmAmC*mA*mU |
| D: | SEQ ID NO: 811 | mG*mU*mUmGmAmCmUmUfGfAfGmUmAmAmAmUmAmUmA*mU*mA |
| 360 | SEQ ID NO: 567 | mU*A*fUmAmUmAfUmUmUmAmCmUmCfAmAfGmUmCmAmAmC*mA*mU |
| D: | SEQ ID NO: 592 | mG*mUmUmGmAmCfUmUfGfAfGmUmAmAmAmUmAmUmA*mU*mA |
| 361 | SEQ ID NO: 569 | mU*fA*mUmAfU-GNA(A)- |
| | | fUmUmUmAmCmUmCfAmAfGmUmCmAmAmC*mA*mU |
| D: | SEQ ID NO: 592 | mG*mU*mUmGmAmCfUmUfGfAfGmUmAmAmAmUmAmUmA*mU*mA |
| 362 | SEQ ID NO: 570 | mU*fA*mUmAmUfA-GNA (U)- |
| | | mUmUmAmCmUmCfAmAfGmUmCmAmAmC*mA*mU |
| D: | SEQ ID NO: 812 | mA*mG*mAmAmAmGfUmUfCfAfAmCmUmGmCmUmUmCmG*mU*mA |
| 363 | SEQ ID NO: 813 | mU*fA*mCmGmAfAmGmCmAmGmUmUmGfAmAfCmUmUmUmCmU*mG*mU |
| D: | SEQ ID NO: 814 | mC *mU*mGmUmAmUmGmUfGfAfAmCmAmCmUmGmUmGmA*mC*mA |
| 364 | SEQ ID NO: 815 | mU*fG*fUmCmAmCfAmGmUmGmUmUmCfAmCfAmUmAmCmAmG*mU*mA |
| D: | SEQ ID NO: 816 | mU*mG*mAmCmUmUmGmAfGfUfAmAmAmUmAmUmAmUmC*mA*mA |
| 365 | SEQ ID NO: 817 | mU*fU*fGmAmUmAfUmAmUmUmUmAmCfUmCfAmAmGmUmCmA*mA*mC |
| D: | SEQ ID NO: 818 | mG*mU*mAmUmGmUmGmAfAfCfAmCmUmGmUmGmAmCmC*mC*mA |
| 366 | SEQ ID NO: 819 | mU*fG*fGmGmUmCfAmCmAmGmUmGmUfUmCfAmCmAmUmAmC*mA*mG |

m indicates 2′O-methyl modified ribose on the listed nucleotide;
f indicates 2′F modified ribose on the listed nucleotide;
*indicates a phosphorothioate bond (in place of a phosphodiester bond);
GNA indicates a glycol nucleic acid nucleotide;
(AP) means an apurinic/apyrimidinic residue, also called an abasic residue.

TABLE 5
Percent Inhibition of human FAS expression in HepG2 cells

| | NV-hFAS HepG2 qPCR | | NV-hFAS HepG2 qPCR | |
|---|---|---|---|---|
| | siRNA Knockdown (% | | siRNA Knockdown | |
| | inhibition) Single | | Concentration Response | |
| | point Summary | | Curve Summary | |
| | | Conc. | Rel IC50 | |
| Duplex | % Inh | (nM) | (nM) | % pct Rel Max |
| D: 112 | 95.1 | 500 | 0.372 | 93.1 |
| D: 113 | 93.5 | 500 | 0.425 | 92 |
| D: 114 | 92.8 | 500 | 0.847 | 92.8 |
| D: 115 | 92.8 | 500 | 0.551 | 92.4 |
| D: 116 | 92.6 | 500 | 0.517 | 92.7 |
| D: 117 | 92.1 | 500 | 0.274 | 93.9 |
| D: 118 | 91.9 | 500 | 0.854 | 90.4 |
| D: 119 | 91.5 | 500 | 0.311 | 91.9 |
| D: 120 | 91 | 500 | 0.486 | 74.8 |
| D: 121 | 89.6 | 500 | 0.441 | 91.3 |
| D: 122 | 89.5 | 500 | 0.4 | 84.2 |
| D: 123 | 89.5 | 500 | 0.969 | 88.2 |
| D: 124 | 89.1 | 500 | 0.49 | 93.4 |
| D: 125 | 88.6 | 500 | 0.908 | 82.9 |
| D: 126 | 88.1 | 500 | | |
| D: 127 | 87.9 | 500 | 0.311 | 89.1 |
| D: 128 | 87.8 | 500 | 0.274 | 89.6 |
| D: 129 | 87.4 | 500 | 0.78 | 78.5 |
| D: 130 | 87.1 | 500 | 0.766 | 86.8 |
| D: 131 | 87 | 500 | 1.35 | 86.4 |
| D: 132 | 87 | 500 | 0.488 | 77.9 |
| D: 133 | 87 | 500 | 0.856 | 90.7 |
| D: 134 | 86.9 | 500 | | |
| D: 135 | 86.5 | 500 | 0.642 | 85.8 |
| D: 136 | 86.3 | 500 | 0.55 | 82.4 |
| D: 137 | 85.4 | 500 | 0.511 | 89.6 |
| D: 138 | 85.3 | 500 | 0.702 | 70.4 |
| D: 139 | 85.1 | 500 | 0.401 | 88.1 |
| D: 140 | 85.1 | 500 | 1.12 | 89.8 |
| D: 141 | 84.8 | 500 | 0.537 | 91.1 |
| D: 142 | 84.4 | 500 | 0.989 | 84.2 |
| D: 143 | 84.2 | 500 | 0.733 | 77.9 |
| D: 144 | 84.1 | 500 | | |
| D: 145 | 84 | 500 | 0.76 | 86.9 |
| D: 146 | 83.6 | 500 | 0.426 | 90.4 |
| D: 147 | 83.2 | 500 | 0.446 | 88.2 |
| D: 148 | 83 | 500 | 0.933 | 80.3 |
| D: 149 | 82.6 | 500 | 0.855 | 86.7 |
| D: 150 | 82.4 | 500 | 0.705 | 88.7 |
| D: 151 | 81.8 | 500 | 0.849 | 84.5 |
| D: 152 | 81.7 | 500 | 0.611 | 86.8 |
| D: 153 | 81.4 | 500 | 0.505 | 85 |
| D: 154 | 80.8 | 500 | 0.519 | 83.4 |
| D: 155 | 80.7 | 500 | | |
| D: 156 | 80.6 | 500 | 1.2 | 82.8 |
| D: 157 | 80.4 | 500 | 2.32 | 77.6 |
| D: 158 | 80.1 | 500 | | |
| D: 159 | 80.1 | 500 | 0.388 | 79.4 |
| D: 160 | 80 | 500 | | |
| D: 161 | 79.9 | 500 | 0.38 | 83.2 |
| D: 162 | 79.7 | 500 | 1.01 | 78.7 |
| D: 163 | 79.3 | 500 | | |
| D: 164 | 78.8 | 500 | 0.913 | 76 |
| D: 165 | 78.6 | 500 | | |
| D: 166 | 78 | 500 | | |
| D: 167 | 77.9 | 500 | 1.63 | 67.3 |
| D: 168 | 76.8 | 500 | | |
| D: 169 | 76.6 | 500 | | |
| D: 170 | 76.5 | 500 | | |
| D: 171 | 76.4 | 500 | | |
| D: 172 | 76.4 | 500 | | |
| D: 173 | 75.7 | 500 | 1.35 | 80.3 |
| D: 174 | 75.2 | 500 | | |
| D: 175 | 74.9 | 500 | | |
| D: 176 | 74.9 | 500 | | |
| D: 177 | 74.9 | 500 | | |
| D: 178 | 74.3 | 500 | | |
| D: 179 | 73.9 | 500 | | |
| D: 180 | 72.3 | 500 | | |
| D: 181 | 72.2 | 500 | | |
| D: 182 | 71.9 | 500 | | |
| D: 183 | 71.8 | 500 | | |
| D: 184 | 71.8 | 500 | | |
| D: 185 | 71.2 | 500 | | |
| D: 186 | 71.1 | 500 | | |
| D: 187 | 71.1 | 500 | | |
| D: 188 | 70.8 | 500 | | |
| D: 189 | 70.7 | 500 | | |
| D: 190 | 70.5 | 500 | | |
| D: 191 | 70 | 500 | | |
| D: 192 | 70 | 500 | | |
| D: 193 | 69.3 | 500 | | |
| D: 194 | 68.4 | 500 | | |
| D: 195 | 67.1 | 500 | | |
| D: 196 | 66.5 | 500 | | |
| D: 197 | 66 | 500 | | |
| D: 198 | 65.5 | 500 | | |
| D: 199 | 65 | 500 | | |
| D: 200 | 64.5 | 500 | | |
| D: 201 | 64.5 | 500 | | |
| D: 202 | 63.6 | 500 | | |
| D: 203 | 63.5 | 500 | | |
| D: 204 | 63.5 | 500 | | |
| D: 205 | 63.4 | 500 | | |
| D: 206 | 61.1 | 500 | | |
| D: 207 | 61 | 500 | | |
| D: 208 | 60.7 | 500 | | |
| D: 209 | 59.8 | 500 | | |
| D: 210 | 59.3 | 500 | | |
| D: 211 | 58.4 | 500 | | |
| D: 212 | 58.4 | 500 | | |
| D: 213 | 57.8 | 500 | | |
| D: 214 | 55.8 | 500 | | |
| D: 215 | 55.1 | 500 | | |
| D: 216 | 54 | 500 | | |
| D: 217 | 53.6 | 500 | | |
| D: 218 | 52.5 | 500 | | |
| D: 219 | 52 | 500 | | |
| D: 220 | 51.4 | 500 | | |
| D: 221 | 50.1 | 500 | | |
| D: 222 | 50 | 500 | | |
| D: 223 | | | 0.281 (0.192, | 57.3 (7.22, n = 2) |
| | | | n = 2) | |
| D: 224 | | | 0.417 (0.0001, | 80.9 (1.16, n = 2) |
| | | | n = 2) | |
| D: 225 | | | 0.375 (0.0255, | 77.7 (2.09, n = 2) |
| | | | n = 2) | |
| D: 226 | | | 0.121 (0.0048, | 82.9 (2.92, n = 2) |
| | | | n = 2) | |
| D: 227 | | | 0.0774 (0.0472, | 80.4 (1.43, n = 2) |
| | | | n = 2) | |
| D: 228 | | | 0.469 | 90.6 |
| D: 229 | | | 0.325 | 88.5 |
| D: 230 | | | 0.231 | 94.2 |
| D: 231 | | | 0.0324 | 91.4 |
| D: 232 | | | 0.0895 | 90.2 |
| D: 233 | | | 0.448 | 81.9 |
| D: 238 | | | 0.095 | 94 |
| D: 239 | | | 0.129 | 93.9 |
| D: 227 | | | 0.031 | 80 |
| D: 231 | | | 0.045 | 93.9 |
| D: 240 | | | 0.535 | 95.2 |

TABLE 6A
In vivo FAS mRNA Knockdown (% KD) and remaining FAS
protein in RNAi agent treated mice expressing hFAS

| | In vivo RNAi treatment in AAV-hFAS Mice | | | | | |
|---|---|---|---|---|---|---|
| | | Run 1 | Run 2 | Run 3 | Run 4 | |
| | 10 wk, | 10 wk, | 10 wk, | 3 wk, | 3 wk, | 2 wk, |
| | 1 mpk, | 3 mpk, | 3 mpk, | 3 mpk, | 3 mpk, | 5 mpk, |
| | % huFas | % huFas | % huFas | % huFas | % huFas | % huFas |
| | mRNA | mRNA | mRNA | mRNA | mRNA | protein |
| Duplex* | KD | KD | KD | KD | KD | remaining |
| D: 117 | | | | | | 66 |
| D: 112 | | | | | | 34 |
| D: 124 | | | | | | 54 |
| D: 116 | 2.4 | 20.2 | | | | 67 |
| D: 114 | 17.8 | 26.3 | | | | 68 |
| D: 115 | 6.3 | 51 | 51 | | | 83 |
| D: 113 | 17 | 11.5 | | | | 70 |
| D: 119 | | | | | | 61 |
| D: 133 | | | | | | 40 |
| D: 121 | | | | | | 64 |
| D: 141 | 20.8 | 29.3 | | | | 67 |
| D: 137 | | | | | | 50 |
| D: 146 | | | | | | 42 |
| D: 128 | 10.9 | 44.2 | | 71.3 | 52.8 | 91 |
| D: 140 | | | | | | 54 |
| D: 118 | | | | | | 70 |
| D: 150 | 44.7 | 35.1 | | | | 70 |
| D: 127 | 26.2 | 52 | | | | 78 |
| D: 147 | | | | | | 56 |
| D: 139 | | | | | | 39 |
| D: 223 | | | 24.6 | | | |
| D: 224 | | | 25.3 | | | |
| D: 225 | | | 48.4 | | | |
| D: 226 | | | 39.1 | | | |
| D: 227 | | | 47.3 | | | |
| D: 228 | | | 1.7 | | | |
| D: 229 | | | 21.7 | | | |
| D: 230 | | | 42.2 | | | |
| D: 231 | | | 49.4 | | | |
| D: 232 | | | 16.1 | | | |
| D: 233 | | | 5.8 | | | |
| D: 172 | | | | 16 | | |
| D: 162 | | | | | 11.7 | |
| D: 151 | | | | 36.7 | | |
| D: 130 | | | | | 38.2 | |
| D: 154 | | | | | 60.8 | |
| D: 158 | | | | | 26.3 | |

*for all duplexes/RNAi agents tested via administration to mice, the antisense strand does not have an extra phosphate addition as shown in Table 4A.

TABLE 6B
In vivo FAS mRNA Knockdown (% KD) in RNAi
agent treated mice expressing hFAS

| | 2 weeks | | | 6 weeks | | |
|---|---|---|---|---|---|---|
| | 1 mpk, | 3 mpk, | 10 mpk, | 1 mpk, | 3 mpk, | 10 mpk, |
| | % huFas | % huFas | % huFas | % huFas | % huFas | % huFas |
| Duplex | KD | KD | KD | KD | KD | KD |
| D: 238 | 50.3 | 71.6 | 95 | 44.7 | 60.2 | 85.4 |
| D: 239 | 41.3 | 62.5 | 89.5 | 13 | 59.6 | 66.3 |
| D: 227 | 54.2 | 81.5 | 94.6 | 22.1 | 60.9 | 91.8 |
| D: 231 | 46.4 | 80.2 | 93.5 | 4 | 50.4 | 80.9 |

### Example 6

### Protein Determination In Vivo in AAV-Fas Expressing Mice Treated with RNAi Agents as Shown in Table 6A and 6B

[0185] Liver samples from the above RNAi agent treated mice were snap frozen and stored at −80 C. While frozen, the lysing matrix D tubes containing ~⅓ liver were transferred to wet ice and XY lite containing 2× Halt buffer was added to each sample at 700 ul/tube. Samples were homogenized using Fast Prep 96 at 1800 rpm for 60 seconds and cooled on ice for 5 minutes. The process was then repeated for another 30 second round of homogenization and then spun down at 20,000 rcf for 5 minutes at 4 C. Samples were centrifuged at 20,000 ref for 10 min at 4 C in Eppendorf tubes to remove cell debris. Protein quantitation was performed on supernatants using the following procedure.

[0186] All samples were equilibrated to 2.0 mg/ml. Supernatants (in XY buffer) were aliquoted into 2 96-well plates at 100 ul sample per well and stored at −80 C and subject to protein quantitation. Prepare BSA standard was prepared at 2 mg/ml and diluted in lysis buffer to create standards. Samples were diluted 1:50 by adding 2 ul lysate to 98 ul XY lite and HALT in a 96 well plate (Corning #3790) and mixed by pipetting. Next 3 mLs Biorad Reagent A and 60 ul of Biorad Reagent S were combined to make Reagent C. 25 ul of Reagent C was added to each well in 96 well plate (Corning #3596). Next, 5 uL of standards or diluted sample was added to each well of the 96 well plate containing reagent C and performed in duplicate. Absorbance was read at 750 nm on SpectraMax in 77/3/350.

[0187] The quantified supernatants were then subject to an Elisa using the Human FAS DuoSet ELISA protocol. Capture antibody was diluted to the working concentration (1.0 ug/ml) in PBS. Immediately, 100 ul was added per well and incubated overnight at room temperature. The next day, plate wells were decanted and washed 3 times with 300 uL/well wash buffer. Plates were blocked by adding 300 ul/well Reagent diluent to each well and incubated at room temperature for 1 hour. The wells were decanted and washed 3 times with 300 ul/well 1× wash buffer and blotted dry after the final wash. Standard curve with control FAS protein were made by diluting in reagent diluent to final concentrations of 4000, 2000, 1000, 500, 250, 125, 62.5, or 0 pg/ml. Thawed liver lysates or standards were added per well and the plate was sealed and incubated for 2 hours at room temperature with gentle shaking. Samples were added at 100 ul/well at 0.1 ug/ul for 10 ug total protein/well diluted in reagent diluent. After incubation, assay plate was decanted and washed 3 times with 300 ul/well 1× wash buffer and blotted dry. 100 ul/well of the detection antibody diluted in reagent diluent was added. The plate was sealed and incubated for 2 hours at room temperature. The detection antibody was diluted to working concentration of 50 ng/ml with reagent diluent. After incubation, assay plate was decanted and washed 3 times with 300 ul/well 1× wash buffer and blotted dry. 100 ul/well of the working dilution (1:200) of Strep-HRP diluted in reagent diluent was added to the plate. The plate was covered and incubated for 20 minutes at room temperature, protecting the plate from direct light. After incubation, the assay plate was decanted, washed 3 times and blotted dry. Next 100 ul/well of Substrate Solution was added and the plate incubated for 20 minutes at room temperature, protecting from direct light. Stop Solution (50 uL) was added to each well and gently mixed. The OD of each well was measured within 30 minutes of adding stop solution using a SpectraMax in 77/3/350 at 450 nm with correction of 540 nm (OD@450 nm-OD@540 nm).

[0188] Results are shown in Tables 6A and 6B.

### Example 7: Additional RNAi Agent Tested for Knockdown

[0189] The additional FAS-GalNAc RNAi agent D-235 shown in Table 7 below is tested in vitro in HepG2 cells as described above and shows about 50% or greater knockdown as compared to a vehicle control. The RNAi agent is tested in AAV-hFAS treated mice, for mRNA knockdown and protein knockdown as described above.

TABLE 7
Additional Sequences

| | | Sequence-Sense Strand |
|---|---|---|
| | | (top) 5′ to 3′ |
| Duplex | SEQ ID | Antisense strand |
| No: | NO: | (bottom) 5′ to 3′ |
| D: 234 | SEQ ID | AGAAAGUUCAACUGCUUCGUA |
| | NO: 572 | |
| | SEQ ID | UACGAAGCAGUUGAACUUUCUGU |
| | NO: 573 | |
| D: 235 | SEQ ID | mA*mG*mAmAmAmGfUmUfCfAf |
| | NO: 574 | AmCmUmGmCmUmUmCmG*mU*mA |
| | SEQ ID | mU*fA*mCmGmAfAmGmCmAmGmU |
| | NO: 575 | mUmGfAmAfCmUmUmUmCmU*mG*mU |

[0190] RNAi agents to mouse FAS mRNA were also generated and tested (see Table 8).

TABLE 8
RNAi agent to mouse FAS mRNA

| | | Sequence-Sense Strand |
|---|---|---|
| | | (top) 5′ to 3′ |
| | SEQ ID | Antisense strand |
| Duplex | NO: | (bottom) 5′ to 3′ |
| D: 367 | SEQ ID | GCCGAAUGUCGCAGAACCUUA |
| | NO: 820 | |
| | SEQ ID | UAAGGUUCUGCGACAUUCGGCUU |
| | NO: 821 | |
| D: 368 | SEQ ID | CCGAAUGUCGCAGAACCUUAA |
| | NO: 822 | |
| | SEQ ID | UUAAGGUUCUGCGACAUUCGGCU |
| | NO: 823 | |
| D: 369 | SEQ ID | AUGUCGCAGAACCUUAGAUAA |
| | NO: 824 | |
| | SEQ ID | UUAUCUAAGGUUCUGCGACAUUC |
| | NO: 825 | |
| D: 370 | SEQ ID | mG*mC*mCmGmAmAmUmGfUfCfGm |
| | NO: 826 | CmAmGmAmAmCmCmU*mU*mA |
| | SEQ ID | mU*fA*fAmGmGmUfUmCmUmGmCm |
| | NO: 827 | GmAfCmAfUmUmCmGmGmC*mU*mU |
| D: 371 | SEQ ID | mC*mC*mGmAmAmUmGmUfCfGfCm |
| | NO: 828 | AmGmAmAmCmCmUmU*mA*mA |
| | SEQ ID | mU*fU*fAmAmGmGfUmUmCmUmGm |
| | NO: 829 | CmGfAmCfAmUmUmCmGmG*mC*mU |
| D: 372 | SEQ ID | mA*mU*mGmUmCmGmCmAfGfAfAm |
| | NO: 830 | CmCmUmUmAmGmAmU*mA*mA |
| | SEQ ID | mU*fU*fAmUmCmUfAmAmGmGmUm |
| | NO: 831 | UmCfUmGfCmGmAmCmAmU*mU*mC |

### Example 8. Characterization of FAS RNAi Agent in Cynomolgus Monkey

[0191] In vivo testing of selected FAS RNAi agents in Cynomolgus monkey (Macaca fascicularis) was conducted to assess their efficacy in silencing the target gene in liver. Cynomolgus monkeys (n=3/group) were given a single subcutaneous administration of the FAS RNAi agent (3 mg/kg, 0.5 ml/kg, in sterile 1×PBS (pH 7.2)) or sterile 1×PBS (pH 7.2) (0.5 ml/kg). Following administration of FAS RNAi agent, incisional wedge biopsies of the liver were collected at 28 days post-administration. cDNA was prepared from RNA isolated from monkey liver samples, and qPCR was performed to determine FAS mRNA knockdown. Table 9 shows the mRNA knockdown of FAS expression in liver at 28 days after the administration of the FAS RNAi agent compared to PBS control group.

TABLE 9
FAS mRNA knockdown in cynomolgus monkey.

| | 28 days |
|---|---|
| | % huFas mRNA KD |
| Duplex | (3 mg/kg) |
| D: 238 | 47 |
| D: 227 | 72 |
| D: 240 | 51 |

1. An RNAi agent for reducing FAS gene expression, wherein the RNAi agent comprises a delivery moiety of Formula I conjugated to R, wherein R is a double stranded RNA (dsRNA) comprising an antisense strand and a sense strand: [chemical structure]
wherein R is conjugated to connection point E of Formula I, optionally via a linker,
wherein the sense strand and the antisense strand form a duplex region, and
wherein the antisense strand comprises a region of complementarity to a FAS mRNA target sequence of SEQ ID NO: 1, and wherein the sense and antisense strand each optionally comprise one or more modified nucleotides and one or more modified internucleotide linkages.

2. The RNAi agent of claim 1, wherein Formula I is conjugated to the sense strand, optionally via a linker.

3. The RNAi agent of claim 2, wherein Formula I is conjugated to the 3′ terminal nucleotide of the sense strand, optionally via a linker.

4. The RNAi agent of claim 1, wherein the antisense strand is 15 to 50 nucleotides in length.

5. The RNAi agent of claim 1, wherein the sense strand is 15 to 50 nucleotides in length.

6. The RNAi agent of claim 1, wherein the antisense strand is between 18 and 23 nucleotides in length.

7. The RNAi agent of claim 1, wherein the sense strand is between 18 and 21 nucleotides in length.

8. The RNAi agent of claim 1, wherein the antisense strand is 23 nucleotides in length and the sense strand is 21 nucleotides in length.

9. The RNAi agent of claim 1, wherein the region of complementarity is at least 18 nucleotides in length.

10. The RNAi agent of claim 1, wherein the antisense strand comprises a sequence selected from the group consisting of SEQ ID NO: 2 to SEQ ID NO: 112.

11. The RNAi agent of claim 1, wherein the antisense strand comprises at least 18 contiguous nucleotides of a sequence selected from the group consisting of SEQ ID NOs: 224 to 334, 337, 338, 573, and 577.

12. The RNAi agent of claim 1, wherein the antisense strand has a nucleotide sequence selected from the group consisting of SEQ ID NOs: 224-334, 337, 338, 573, and 577, or a sequence having at least 90% sequence identity thereto.

13. The RNAi agent of claim 1, wherein the sense strand is selected from the group consisting of SEQ ID NOs: 113 to 223, 335, 336, 572, and 576, or a sequence having at least 90% sequence identity thereto.

14. The RNAi agent of claim 1, wherein the duplex region between the sense strand and the antisense strand comprises 0, 1, 2, or 3 mismatches between the sense strand and the antisense strand.

15. The RNAi agent of claim 1, wherein the sense strand comprises a first nucleic acid sequence and the antisense strand comprises a second nucleic acid sequence, wherein the first nucleic acid sequence and the second nucleic acid sequence are selected from the group consisting of:
a. the first nucleic acid sequence has at least 95% sequence identity to SEQ ID NO: 129, and the second nucleic acid sequence has at least 95% sequence identity to SEQ ID NO: 240;
b. the first nucleic acid sequence has at least 95% sequence identity to SEQ ID NO: 116, and the second nucleic acid sequence has at least 95% sequence identity to SEQ ID NO: 227;
c. the first nucleic acid sequence has at least 95% sequence identity to SEQ ID NO: 151, and the second nucleic acid sequence has at least 95% sequence identity to SEQ ID NO: 262;
d. the first nucleic acid sequence has at least 95% sequence identity to SEQ ID NO: 128, and the second nucleic acid sequence has at least 95% sequence identity to SEQ ID NO: 239; and
e. the first nucleic acid sequence has at least 95% sequence identity to SEQ ID NO: 155, and the second nucleic acid sequence has at least 95% sequence identity to SEQ ID NO: 266.

16. The RNAi agent of claim 1, wherein the sense strand comprises a first nucleic acid sequence and the antisense strand comprises a second nucleic acid sequence, wherein the first nucleic acid sequence and the second nucleic acid sequence are selected from the group consisting of:
a. the first nucleic acid sequence comprises SEQ ID NO: 129, and the second nucleic acid sequence comprises SEQ ID NO: 240;
b. the first nucleic acid sequence comprises SEQ ID NO: 116, and the second nucleic acid sequence comprises SEQ ID NO: 227;
c. the first nucleic acid sequence comprises SEQ ID NO: 151, and the second nucleic acid sequence comprises SEQ ID NO: 262;
d. the first nucleic acid sequence comprises SEQ ID NO: 128, and the second nucleic acid sequence comprises SEQ ID NO: 239; and
e. the first nucleic acid sequence comprises SEQ ID NO: 155, and the second nucleic acid sequence comprises SEQ ID NO: 266.

17. The RNAi agent of claim 16, wherein the sense strand or the antisense strand each independently comprise one or more modified nucleotides.

18. The RNAi agent of claim 17, wherein the sense strand or the antisense strand each independently comprise one or more modified nucleotides, and the modified nucleotides are independently 2′ fluoro modified nucleotide residues, 2′-O-methyl modified nucleotides, or glycol nucleic acid (GNA) nucleotides.

19. The RNAi agent of claim 18, wherein the sense strand comprises one or more modified nucleotide residues, and wherein at least one modified nucleotide residue is a GNA nucleotide that is present in an internal position of the sense strand.

20. The RNAi agent of claim 19, wherein each nucleotide of the sense strand and each nucleotide of the antisense strand is a modified nucleotide.

21. The RNAi agent of claim 20, wherein the antisense strand is 23 nucleotides in length and wherein each nucleotide of the antisense strand is a modified nucleotide, and 2′ fluoro modified nucleotides are present at
a. Positions 2, 3, 7, 14, and 16 from the 5′ end of the antisense strand; or
b. Positions 2, 5, 7, 14, and 16 from the 5′ end of the antisense strand; or
c. Positions 2, 3, 8, 14, and 16 from the 5′ end of the antisense strand; or
d. Positions 2, 5, 8, 14, and 16 from the 5′ end of the antisense strand; or
e. Positions 2, 6, 14, and 16 from the 5′ end of the antisense strand.

22. The RNAi agent of claim 21, wherein the sense strand and antisense strand each independently comprise one or more modified internucleotide linkages, and wherein each modified internucleotide linkage is a phosphorothioate linkage.

23. The RNAi agent of claim 22, wherein the sense strand and antisense strand each independently comprise four phosphorothioate linkages.

24. The RNAi agent of claim 22, wherein the 5′ terminal nucleotide of the antisense strand comprises a phosphate group or a phosphate analog.

25. The RNAi agent of claim 1, wherein the antisense strand comprises a sequence selected from the group consisting of SEQ ID NOs: 340, 342, 344, 346, 348, 350, 352, 354, 356, 358, 360, 362, 364, 366, 368, 370, 372, 374, 376, 378, 380, 382, 384, 386, 388, 390, 392, 394, 396, 398, 400, 402, 404, 406, 408, 410, 412, 414, 416, 418, 420, 422, 424, 426, 428, 430, 432, 434, 436, 438, 440, 442, 444, 446, 448, 450, 452, 454, 456, 458, 460, 462, 464, 466, 468, 470, 472, 474, 476, 478, 480, 482, 484, 486, 488, 490, 492, 494, 496, 498, 500, 502, 504, 506, 508, 510, 512, 514, 516, 518, 520, 522, 524, 526, 528, 530, 532, 534, 536, 538, 540, 542, 544, 546, 548, 550, 552, 554, 556, 558, 560, 562, 563, 566, 567, 569, 570, 571, 575, 579, 581, 583, 585, or a sequence having at least 90% sequence identity thereto, wherein the 5′ terminal nucleotide of the antisense strand comprises a vinyl phosphonate, a phosphate, or a hydroxyl group.

26. The RNAi agent of claim 1, wherein the sense strand comprises a sequence selected from the group consisting of SEQ ID NOs: 339, 341, 343, 345, 347, 349, 351, 353, 355, 357, 359, 361, 363, 365, 367, 369, 371, 373, 375, 377, 379, 381, 383, 385, 387, 389, 391, 393, 395, 397, 399, 401, 403, 405, 407, 409, 411, 413, 415, 417, 419, 421, 423, 425, 427, 429, 431, 433, 435, 437, 439, 441, 443, 445, 447, 449, 451, 453, 455, 457, 459, 461, 463, 465, 467, 469, 471, 473, 475, 477, 479, 481, 483, 485, 487, 489, 491, 493, 495, 497, 499, 501, 503, 505, 507, 509, 511, 513, 515, 517, 519, 521, 523, 525, 527, 529, 531, 533, 535, 537, 539, 541, 543, 545, 547, 549, 551, 553, 555, 557, 559, 561, 564, 565, 568, 574, 578, 580, 582, 584 or a sequence having at least 90% sequence identity thereto, wherein the 5′ terminal nucleotide of the antisense strand comprises a vinyl phosphonate, a phosphate, or a hydroxyl group.

27. The RNAi agent of claim 1, wherein the antisense strand comprises a sequence selected from the group consisting of SEQ ID NOs: 587, 589, 591, 593, 595, 597, 599, 601, 603, 605, 607, 609, 611, 613, 615, 617, 619, 621, 623, 625, 627, 629, 631, 633, 635, 637, 639, 641, 643, 645, 647, 649, 651, 653, 655, 657, 659, 661, 663, 665, 667, 669, 671, 673, 675, 677, 679, 681, 683, 685, 687, 689, 691, 693, 695, 697, 699, 701, 703, 705, 707, 709, 711, 713, 715, 717, 719, 721, 723, 725, 727, 729, 731, 733, 735, 737, 739, 741, 743, 745, 747, 749, 751, 753, 755, 757, 759, 761, 763, 765, 767, 769, 771, 773, 775, 777, 779, 781, 783, 785, 787, 789, 791, 793, 795, 797, 799, 801, 803, 805, 807, 813, 815, 817, 819, or a sequence having at least 90% sequence identity thereto.

28. The RNAi agent of claim 1, wherein the sense strand comprises a sequence selected from the group consisting of SEQ ID NOs: 588, 590, 592, 594, 596, 598, 600, 602, 604, 606, 608, 610, 612, 614, 616, 618, 620, 622, 624, 626, 628, 630, 632, 634, 636, 638, 640, 642, 644, 646, 648, 650, 652, 654, 656, 658, 660, 662, 664, 666, 668, 670, 672, 674, 676, 678, 680, 682, 684, 686, 688, 690, 692, 694, 696, 698, 700, 702, 704, 706, 708, 710, 712, 714, 716, 718, 720, 722, 724, 726, 728, 730, 732, 734, 736, 738, 740, 742, 744, 746, 748, 750, 752, 754, 756, 758, 760, 762, 764, 766, 768, 770, 772, 774, 776, 778, 780, 782, 784, 786, 788, 790, 792, 794, 796, 798, 800, 802, 804, 806, 808, 809, 810, 811, 812, 814, 816, 818, or a sequence having at least 90% sequence identity thereto.

29. The RNAi agent of claim 1, wherein the sense strand comprises a first nucleic acid sequence and the antisense strand comprises a second nucleic acid sequence, wherein the first nucleic acid sequence and the second nucleic acid sequence are selected from the group consisting of:
a. the first nucleic acid sequence has at least 95% sequence identity to SEQ ID NO: 339, and the second nucleic acid sequence has at least 95% sequence identity to SEQ ID NO: 340;
b. the first nucleic acid sequence has at least 95% sequence identity to SEQ ID NO: 341, and the second nucleic acid sequence has at least 95% sequence identity to SEQ ID NO: 342;
c. the first nucleic acid sequence has at least 95% sequence identity to SEQ ID NO: 343, and the second nucleic acid sequence has at least 95% sequence identity to SEQ ID NO: 344;
d. the first nucleic acid sequence has at least 95% sequence identity to SEQ ID NO:345, and the second nucleic acid sequence has at least 95% sequence identity to SEQ ID NO: 346;
e. the first nucleic acid sequence has at least 95% sequence identity to SEQ ID NO: 347, and the second nucleic acid sequence has at least 95% sequence identity to SEQ ID NO: 348;
f. the first nucleic acid sequence has at least 95% sequence identity to SEQ ID NO: 349, and the second nucleic acid sequence has at least 95% sequence identity to SEQ ID NO: 350;
g. the first nucleic acid sequence has at least 95% sequence identity to SEQ ID NO: 353, and the second nucleic acid sequence has at least 95% sequence identity to SEQ ID NO: 354;
h. the first nucleic acid sequence has at least 95% sequence identity to SEQ ID NO: 363 and the second nucleic acid sequence has at least 95% sequence identity to SEQ ID NO: 364; and
i. the first nucleic acid sequence has at least 95% sequence identity to SEQ ID NO: 381, and the second nucleic acid sequence has at least 95% sequence identity to SEQ ID NO: 382.

30. The RNAi agent of claim 1, wherein the sense strand comprises a first nucleic acid sequence and the antisense strand comprises a second nucleic acid sequence, wherein the first nucleic acid sequence and the second nucleic acid sequence are selected from the group consisting of:
a. the first nucleic acid sequence has at least 95% sequence identity to SEQ ID NO: 564 or 809, and the second nucleic acid sequence has at least 95% sequence identity to SEQ ID NO: 571;
b. the first nucleic acid sequence has at least 95% sequence identity to SEQ ID NO: 568 or 811, and the second nucleic acid sequence has at least 95% sequence identity to SEQ ID NO: 567;
c. the first nucleic acid sequence has at least 95% sequence identity to SEQ ID NO: 580 or 814, and the second nucleic acid sequence has at least 95% sequence identity to SEQ ID NO: 581 or 815;
d. the first nucleic acid sequence has at least 95% sequence identity to SEQ ID NO: 582 or 816, and the second nucleic acid sequence has at least 95% sequence identity to SEQ ID NO: 583 or 817; and
e. the first nucleic acid sequence has at least 95% sequence identity to SEQ ID NO: 584 or 818, and the second nucleic acid sequence has at least 95% sequence identity to SEQ ID NO: 585 or 819.

31. The RNAi agent of claim 1, wherein the sense strand comprises a first nucleic acid sequence and the antisense strand comprises a second nucleic acid sequence, wherein the first nucleic acid sequence and the second nucleic acid sequence are selected from the group consisting of:
a. the first nucleic acid sequence comprises SEQ ID NO: 564 or 809, and the second nucleic acid sequence comprises SEQ ID NO: 571;
b. the first nucleic acid sequence comprises SEQ ID NO: 568 or 811, and the second nucleic acid sequence comprises SEQ ID NO: 567;
c. the first nucleic acid sequence comprises SEQ ID NO: 580 or 814, and the second nucleic acid sequence comprises SEQ ID NO: 581 or 815;
d. the first nucleic acid sequence comprises SEQ ID NO: 582 or 816, and the second nucleic acid sequence comprises SEQ ID NO: 583 or 817; and
e. the first nucleic acid sequence comprises SEQ ID NO: 584 or 818, and the second nucleic acid sequence comprises SEQ ID NO: 585 or 819.

32. The RNAi agent of claim 29, wherein the 5′ terminal nucleotide of the antisense strand contains a vinyl phosphonate, a phosphate group, or an OH group.

33. The RNAi agent of claim 1, wherein R is conjugated to Formula I via a linker.

34. The RNAi agent of claim 1, wherein R is conjugated to Formula I via a linker, and wherein linker comprises a linker of Formula II having connection points A and B or the linker comprises Formula III having connection points C and D, and wherein: [chemical structure]
a. Formula I is conjugated to Formula II at connection point A and Formula II is conjugated to a phosphate group or a phosphorothioate group at connection point B, and the phosphate group or phosphorothioate group is further conjugated to R; or
b. Formula I is conjugated to Formula III at connection point C and Formula III is conjugated to a phosphate group or phosphorothioate group at connection point D, and the phosphate group or phosphorothioate group is further conjugated to R.

35. The RNAi agent of claim 1, wherein R is conjugated to Formula I via a linker, and wherein the linker is a linker comprising Formula III having connection points C and D: [chemical structure]
and wherein Formula I is conjugated to Formula III at connection point C and Formula III is conjugated to a phosphate group or a phosphorothioate group at connection point D, and the phosphate group or the phosphorothioate group is further conjugated to R.

36. The RNAi agent of claim 1, wherein the RNAi agent decreases expression of the FAS gene in a liver cell, as compared to a control.

37. The RNAi agent of claim 1, wherein the linker is of Formula III and Formula III is conjugated to a phosphate group at connection point D, and wherein the sense strand comprises a first nucleic acid sequence and the antisense strand comprises a second nucleic acid sequence, wherein the first nucleic acid sequence comprises SEQ ID NO: 564, and the second nucleic acid sequence comprises SEQ ID NO: 571.

38. (canceled)

39. A pharmaceutical composition comprising the RNAi agent of claim 1, and one or more pharmaceutically acceptable excipients.

40. (canceled)

41. A method of treating autoimmune hepatitis (AIH) in a patient in need thereof, comprising administering to the patient the RNAi agent of claim 1, or a pharmaceutical composition thereof.

42. A method of decreasing FAS expression in a cell, comprising contacting the cell with the RNAi agent of claim 1.

43. The method of claim 42, wherein the method further comprises incubating the cell for a time sufficient for decreasing the level of FAS mRNA by at least 50% as compared to an untreated or control treated cell.

44. A method of treating autoimmune hepatitis (AIH) in a patient in need thereof, comprising administering to the patient the RNAi agent of claim 37, or a pharmaceutical composition thereof.

The application's sequence listing, which the Patent Office published only in electronic form, follows.

SEQUENCE LISTING (831 sequences)

SEQ ID NO: 1 - DNA, 3696 bp, Homo sapiens
  source 1..3696: mol_type = genomic DNA
ctcttctcccgcgggttggtggacccgctcagtacggagttggggaagctctttcacttcggaggattgctcaacaaccatgctgggcatctggaccctcctacctctggttcttacgtctgttgctagattatcgtccaaaagtgttaatgcccaagtgactgacatcaactccaagggattggaattgaggaagactgttactacagttgagactcagaacttggaaggcctgcatcatgatggccaattctgccataagccctgtcctccaggtgaaaggaaagctagggactgcacagtcaatggggatgaaccagactgcgtgccctgccaagaagggaaggagtacacagacaaagcccatttttcttccaaatgcagaagatgtagattgtgtgatgaaggacatggcttagaagtggaaataaactgcacccggacccagaataccaagtgcagatgtaaaccaaactttttttgtaactctactgtatgtgaacactgtgacccttgcaccaaatgtgaacatggaatcatcaaggaatgcacactcaccagcaacaccaagtgcaaagaggaaggatccagatctaacttggggtggctttgtcttcttcttttgccaattccactaattgtttgggtgaagagaaaggaagtacagaaaacatgcagaaagcacagaaaggaaaaccaaggttctcatgaatctccaactttaaatcctgaaacagtggcaataaatttatctgatgttgacttgagtaaatatatcaccactattgctggagtcatgacactaagtcaagttaaaggctttgttcgaaagaatggtgtcaatgaagccaaaatagatgagatcaagaatgacaatgtccaagacacagcagaacagaaagttcaactgcttcgtaattggcatcaacttcatggaaagaaagaagcgtatgacacattgattaaagatctcaaaaaagccaatctttgtactcttgcagagaaaattcagactatcatcctcaaggacattactagtgactcagaaaattcaaacttcagaaatgaaatccaaagcttggtctagagtgaaaaacaacaaattcagttctgagtatatgcaattagtgtttgaaaagattcttaatagctggctgtaaatactgcttggttttttactgggtacattttatcatttattagcgctgaagagccaacatatttgtagatttttaatatctcatgattctgcctccaaggatgtttaaaatctagttgggaaaacaaacttcatcaagagtaaatgcagtggcatgctaagtacccaaataggagtgtatgcagaggatgaaagattaagattatgctctggcatctaacatatgattctgtagtatgaatgtaatcagtgtatgttagtacaaatgtctatccacaggctaaccccactctatgaatcaatagaagaagctatgaccttttgctgaaatatcagttactgaacaggcaggccactttgcctctaaattacctctgataattctagagattttaccatatttctaaactttgtttataactctgagaagatcatatttatgtaaagtatatgtatttgagtgcagaatttaaataaggctctacctcaaagacctttgcacagtttattggtgtcatattatacaatatttcaattgtgaattcacatagaaaacattaaattataatgtttgactattatatatgtgtatgcattttactggctcaaaactacctacttctttctcaggcatcaaaagcattttgagcaggagagtattactagagctttgccacctctccatttttgccttggtgctcatcttaatggcctaatgcacccccaaacatggaaatatcaccaaaaaatacttaatagtccaccaaaaggcaagactgcccttagaaattctagcctggtttggagatactaactgctctcagagaaagtagctttgtgacatgtcatgaacccatgtttgcaatcaaagatgataaaatagattcttatttttcccccacccccgaaaatgttcaataatgtcccatgtaaaacctgctacaaatggcagcttatacatagcaatggtaaaatcatcatctggatttaggaattgctcttgtcatacccccaagtttctaagatttaagattctccttactactatcctacgtttaaatatctttgaaagtttgtattaaatgtgaattttaagaaataatatttatatttctgtaaatgtaaactgtgaagatagttataaactgaagcagatacctggaaccacctaaagaacttccatttatggaggatttttttgccccttgtgtttggaattataaaatataggtaaaagtacgtaattaaataatgtttttggtatttctggttttctcttttttggtaggggcttgctttttggttttgtcttccttttctctaactgatgctaaatataacttgtctttaatgcttcttggatcccttagaaggtacttcctttttaaccttaacccttttagtagttaaataattatttccataggttgctattgccaagaagacctcttccaaacagcacatgattattcgtcaaacagtttcgtattccagatactggaatgtggataagaaagtatacatttcaaggggtaggttttattattaagaaagccaaatgaggattttgaaatattctttcctgcatattatccattctagctacatgctggccagtgggccacctttcttttctgcaatttaatgctagtaatatattctatttaacccatgagtcccaaagtattagcatttcaacatgtaagcatgtcggtaagatagttgtgctttgcttagggttccctcctgtgttatggtctggaaagtgtctttaggcagaaagtctgagtgatcacagggttcactcattaatttctcttttctgagccatcatagtctgtgctgtctgctctccagttttctatttctagacagaagtagggcaagttaggtactagttattcttcatggccagaagtgcaagttctactttgcaagacaagattaagttagagaacaccctattccactttggtgaactcagagcaagaactttgagttcctttgggaggaagacagtggagaagtctttgtacttggtgatgtggtttttttcctcatggcttcacctagtggccccaagcatgacttctcccatgtcaatgagcacagccacattcccgagttgaggtgaccccacggtccagaatcatcctcattctggtgaacctggttctctttgtggtgggcatactgggtaggagaatcacccaaaggtcacccatgagctgcagaaaaaaaggctatttgcagaaggagctcacagatcacattgaaagcattgcatattcaaacatcttggtcttctttattggcatgcccacagggtcttctgacctctgattagatcagacactttttagatattgaatcatcagtttctgtacaactatctgaataaggtatataatcaatgaaatttagaatttttttctatgcttactcctgattggtaatttgtttgggtttagaattctatacaaggccatttgtaattttcctcagcactttaaaaatattaaaccatgttttcttaa

SEQ ID NO: 2 - RNA, 18 nt, synthetic construct
  source 1..18: mol_type = other RNA
tctaagccatgtccttca

SEQ ID NO: 3 - RNA, 18 nt, synthetic construct
  source 1..18: mol_type = other RNA
tacaaaaaaagtttggtt

SEQ ID NO: 4 - RNA, 18 nt, synthetic construct
  source 1..18: mol_type = other RNA
atcacacaatctacatct

SEQ ID NO: 5 - RNA, 18 nt, synthetic construct
  source 1..18: mol_type = other RNA
atatatttactcaagtca

SEQ ID NO: 6 - RNA, 18 nt, synthetic construct
  source 1..18: mol_type = other RNA
tggacattgtcattcttg

SEQ ID NO: 7 - RNA, 18 nt, synthetic construct
  source 1..18: mol_type = other RNA
tatatttactcaagtcaa

SEQ ID NO: 8 - RNA, 18 nt, synthetic construct
  source 1..18: mol_type = other RNA
ttgatctcatctattttg

SEQ ID NO: 9 - RNA, 18 nt, synthetic construct
  source 1..18: mol_type = other RNA
caatctacatcttctgca

SEQ ID NO: 10 - RNA, 18 nt, synthetic construct
  source 1..18: mol_type = other RNA
accattctttcgaacaaa

SEQ ID NO: 11 - RNA, 18 nt, synthetic construct
  source 1..18: mol_type = other RNA
gtgatatatttactcaag

SEQ ID NO: 12 - RNA, 18 nt, synthetic construct
  source 1..18: mol_type = other RNA
tgtcattcttgatctcat

SEQ ID NO: 13 - RNA, 18 nt, synthetic construct
  source 1..18: mol_type = other RNA
gtggtgatatatttactc

SEQ ID NO: 14 - RNA, 18 nt, synthetic construct
  source 1..18: mol_type = other RNA
cattcttgatctcatcta

SEQ ID NO: 15 - RNA, 18 nt, synthetic construct
  source 1..18: mol_type = other RNA
caccattctttcgaacaa

SEQ ID NO: 16 - RNA, 18 nt, synthetic construct
  source 1..18: mol_type = other RNA
aagccatgtccttcatca

SEQ ID NO: 17 - RNA, 18 nt, synthetic construct
  source 1..18: mol_type = other RNA
tgatatatttactcaagt

SEQ ID NO: 18 - RNA, 18 nt, synthetic construct
  source 1..18: mol_type = other RNA
tacgaagcagttgaactt

SEQ ID NO: 19 - RNA, 18 nt, synthetic construct
  source 1..18: mol_type = other RNA
acacaatctacatcttct

SEQ ID NO: 20 - RNA, 18 nt, synthetic construct
  source 1..18: mol_type = other RNA
caagggtcacagtgttca

SEQ ID NO: 21 - RNA, 18 nt, synthetic construct
  source 1..18: mol_type = other RNA
ctttaacttgacttagtg

SEQ ID NO: 22 - RNA, 18 nt, synthetic construct
  source 1..18: mol_type = other RNA
tacatctgcacttggtat

SEQ ID NO: 23 - RNA, 18 nt, synthetic construct
  source 1..18: mol_type = other RNA
gctgtgtcttggacattg

SEQ ID NO: 24 - RNA, 18 nt, synthetic construct
  source 1..18: mol_type = other RNA
ttctaagccatgtccttc

SEQ ID NO: 25 - RNA, 18 nt, synthetic construct
  source 1..18: mol_type = other RNA
tacatcttctgcatttgg

SEQ ID NO: 26 - RNA, 18 nt, synthetic construct
  source 1..18: mol_type = other RNA
acattgtcattcttgatc

SEQ ID NO: 27 - RNA, 18 nt, synthetic construct
  source 1..18: mol_type = other RNA
ttggtttacatctgcact

SEQ ID NO: 28 - RNA, 18 nt, synthetic construct
  source 1..18: mol_type = other RNA
acaccattctttcgaaca

SEQ ID NO: 29 - RNA, 18 nt, synthetic construct
  source 1..18: mol_type = other RNA
cacacaatctacatcttc

SEQ ID NO: 30 - RNA, 18 nt, synthetic construct
  source 1..18: mol_type = other RNA
tctctgcaagagtacaaa

SEQ ID NO: 31 - RNA, 18 nt, synthetic construct
  source 1..18: mol_type = other RNA
ttggtgcaagggtcacag

SEQ ID NO: 32 - RNA, 18 nt, synthetic construct
  source 1..18: mol_type = other RNA
ctacatcttctgcatttg

SEQ ID NO: 33 - RNA, 18 nt, synthetic construct
  source 1..18: mol_type = other RNA
tctgctgtgtcttggaca

SEQ ID NO: 34 - RNA, 18 nt, synthetic construct
  source 1..18: mol_type = other RNA
gtactccttcccttcttg

SEQ ID NO: 35 - RNA, 18 nt, synthetic construct
  source 1..18: mol_type = other RNA
tggtgatatatttactca

SEQ ID NO: 36 - RNA, 18 nt, synthetic construct
  source 1..18: mol_type = other RNA
gtcattcttgatctcatc

SEQ ID NO: 37 - RNA, 18 nt, synthetic construct
  source 1..18: mol_type = other RNA
gatatatttactcaagtc

SEQ ID NO: 38 - RNA, 18 nt, synthetic construct
  source 1..18: mol_type = other RNA
atagtggtgatatattta

SEQ ID NO: 39 - RNA, 18 nt, synthetic construct
  source 1..18: mol_type = other RNA
gtttacatctgcacttgg

SEQ ID NO: 40 - RNA, 18 nt, synthetic construct
  source 1..18: mol_type = other RNA
gtcacagtgttcacatac

SEQ ID NO: 41 - RNA, 18 nt, synthetic construct
  source 1..18: mol_type = other RNA
ggacattgtcattcttga

SEQ ID NO: 42 - RNA, 18 nt, synthetic construct
  source 1..18: mol_type = other RNA
ttaacttgacttagtgtc

SEQ ID NO: 43 - RNA, 18 nt, synthetic construct
  source 1..18: mol_type = other RNA
attcttgatctcatctat

SEQ ID NO: 44 - RNA, 18 nt, synthetic construct
  source 1..18: mol_type = other RNA
gggtcacagtgttcacat

SEQ ID NO: 45 - RNA, 18 nt, synthetic construct
  source 1..18: mol_type = other RNA
ttacatctgcacttggta

SEQ ID NO: 46 - RNA, 18 nt, synthetic construct
  source 1..18: mol_type = other RNA
cattgtcattcttgatct

SEQ ID NO: 47 - RNA, 18 nt, synthetic construct
  source 1..18: mol_type = other RNA
ttctctgcaagagtacaa

SEQ ID NO: 48 - RNA, 18 nt, synthetic construct
  source 1..18: mol_type = other RNA
tctcatctattttggctt

SEQ ID NO: 49 - RNA, 18 nt, synthetic construct
  source 1..18: mol_type = other RNA
tagtaatgtccttgagga

SEQ ID NO: 50 - RNA, 18 nt, synthetic construct
  source 1..18: mol_type = other RNA
agggtcacagtgttcaca

SEQ ID NO: 51 - RNA, 18 nt, synthetic construct
  source 1..18: mol_type = other RNA
agtcacttgggcattaac

SEQ ID NO: 52 - RNA, 18 nt, synthetic construct
  source 1..18: mol_type = other RNA
ccaattacgaagcagttg

SEQ ID NO: 53 - RNA, 18 nt, synthetic construct
  source 1..18: mol_type = other RNA
cacaatctacatcttctg

SEQ ID NO: 54 - RNA, 18 nt, synthetic construct
  source 1..18: mol_type = other RNA
tagtggtgatatatttac

SEQ ID NO: 55 - RNA, 18 nt, synthetic construct
  source 1..18: mol_type = other RNA
tggtgagtgtgcattcct

SEQ ID NO: 56 - RNA, 18 nt, synthetic construct
  source 1..18: mol_type = other RNA
cctagctttcctttcacc

SEQ ID NO: 57 - RNA, 18 nt, synthetic construct
  source 1..18: mol_type = other RNA
gtgtcttggacattgtca

SEQ ID NO: 58 - RNA, 18 nt, synthetic construct
  source 1..18: mol_type = other RNA
tgctggtgagtgtgcatt

SEQ ID NO: 59 - RNA, 18 nt, synthetic construct
  source 1..18: mol_type = other RNA
cctttcacctggaggaca

SEQ ID NO: 60 - RNA, 18 nt, synthetic construct
  source 1..18: mol_type = other RNA
acaatctacatcttctgc

SEQ ID NO: 61 - RNA, 18 nt, synthetic construct
  source 1..18: mol_type = other RNA
ccatgtccttcatcacac

SEQ ID NO: 62 - RNA, 18 nt, synthetic construct
  source 1..18: mol_type = other RNA
ttacgaagcagttgaact

SEQ ID NO: 63 - RNA, 18 nt, synthetic construct
  source 1..18: mol_type = other RNA
cagtcacttgggcattaa

SEQ ID NO: 64 - RNA, 18 nt, synthetic construct
  source 1..18: mol_type = other RNA
tatttactcaagtcaaca

SEQ ID NO: 65 - RNA, 18 nt, synthetic construct
  source 1..18: mol_type = other RNA
atctcatctattttggct

SEQ ID NO: 66 - RNA, 18 nt, synthetic construct
  source 1..18: mol_type = other RNA
caattacgaagcagttga

SEQ ID NO: 67 - RNA, 18 nt, synthetic construct
  source 1..18: mol_type = other RNA
aattttctctgcaagagt

SEQ ID NO: 68 - RNA, 18 nt, synthetic construct
  source 1..18: mol_type = other RNA
tcactagtaatgtccttg

SEQ ID NO: 69 - RNA, 18 nt, synthetic construct
  source 1..18: mol_type = other RNA
tgtctgtgtactccttcc

SEQ ID NO: 70 - RNA, 18 nt, synthetic construct
  source 1..18: mol_type = other RNA
aacttgacttagtgtcat

SEQ ID NO: 71 - RNA, 18 nt, synthetic construct
  source 1..18: mol_type = other RNA
cactagtaatgtccttga

SEQ ID NO: 72 - RNA, 18 nt, synthetic construct
  source 1..18: mol_type = other RNA
ccattctttcgaacaaag

SEQ ID NO: 73 - RNA, 18 nt, synthetic construct
  source 1..18: mol_type = other RNA
tggcagggcacgcagtct

SEQ ID NO: 74 - RNA, 18 nt, synthetic construct
  source 1..18: mol_type = other RNA
tgatctcatctattttgg

SEQ ID NO: 75 - RNA, 18 nt, synthetic construct
  source 1..18: mol_type = other RNA
ctgtgtactccttccctt

SEQ ID NO: 76 - RNA, 18 nt, synthetic construct
  source 1..18: mol_type = other RNA
tgtccttcatcacacaat

SEQ ID NO: 77 - RNA, 18 nt, synthetic construct
  source 1..18: mol_type = other RNA
agcaatcctccgaagtga

SEQ ID NO: 78 - RNA, 18 nt, synthetic construct
  source 1..18: mol_type = other RNA
tgcagtccctagctttcc

SEQ ID NO: 79 - RNA, 18 nt, synthetic construct
  source 1..18: mol_type = other RNA
ttccacttctaagccatg

SEQ ID NO: 80 - RNA, 18 nt, synthetic construct
  source 1..18: mol_type = other RNA
attttctctgcaagagta

SEQ ID NO: 81 - RNA, 18 nt, synthetic construct
  source 1..18: mol_type = other RNA
gggcacgcagtctggttc

SEQ ID NO: 82 - RNA, 18 nt, synthetic construct
  source 1..18: mol_type = other RNA
taacttgacttagtgtca

SEQ ID NO: 83 - RNA, 18 nt, synthetic construct
  source 1..18: mol_type = other RNA
gacaccattctttcgaac

SEQ ID NO: 84 - RNA, 18 nt, synthetic construct
  source 1..18: mol_type = other RNA
tggtgcaagggtcacagt

SEQ ID NO: 85 - RNA, 18 nt, synthetic construct
  source 1..18: mol_type = other RNA
tccgggtgcagtttattt

SEQ ID NO: 86 - RNA, 18 nt, synthetic construct
  source 1..18: mol_type = other RNA
tcacttgggcattaacac

SEQ ID NO: 87 - RNA, 18 nt, synthetic construct
  source 1..18: mol_type = other RNA
aattacgaagcagttgaa

SEQ ID NO: 88 - RNA, 18 nt, synthetic construct
  source 1..18: mol_type = other RNA
ttgagcaatcctccgaag

SEQ ID NO: 89 - RNA, 18 nt, synthetic construct
  source 1..18: mol_type = other RNA
ctcatctattttggcttc

SEQ ID NO: 90 - RNA, 18 nt, synthetic construct
  source 1..18: mol_type = other RNA
gttgagcaatcctccgaa

SEQ ID NO: 91 - RNA, 18 nt, synthetic construct
  source 1..18: mol_type = other RNA
ccctagctttcctttcac

SEQ ID NO: 92 - RNA, 18 nt, synthetic construct
  source 1..18: mol_type = other RNA
gtctgtgtactccttccc

SEQ ID NO: 93 - RNA, 18 nt, synthetic construct
  source 1..18: mol_type = other RNA
gggtgcagtttatttcca

SEQ ID NO: 94 - RNA, 18 nt, synthetic construct
  source 1..18: mol_type = other RNA
tgtgtcttggacattgtc

SEQ ID NO: 95 - RNA, 18 nt, synthetic construct
  source 1..18: mol_type = other RNA
atgtccttcatcacacaa

SEQ ID NO: 96 - RNA, 18 nt, synthetic construct
  source 1..18: mol_type = other RNA
acgcagtctggttcatcc

SEQ ID NO: 97 - RNA, 18 nt, synthetic construct
  source 1..18: mol_type = other RNA
tcagtcacttgggcatta

SEQ ID NO: 98 - RNA, 18 nt, synthetic construct
  source 1..18: mol_type = other RNA
ggcagggcacgcagtctg

SEQ ID NO: 99 - RNA, 18 nt, synthetic construct
  source 1..18: mol_type = other RNA
ggtgcaagggtcacagtg

SEQ ID NO: 100 - RNA, 18 nt, synthetic construct
  source 1..18: mol_type = other RNA
tttgtctgtgtactcctt

SEQ ID NO: 101 - RNA, 18 nt, synthetic construct
  source 1..18: mol_type = other RNA
cacgcagtctggttcatc

SEQ ID NO: 102 - RNA, 18 nt, synthetic construct
  source 1..18: mol_type = other RNA
cttcttggcagggcacgc

SEQ ID NO: 103 - RNA, 18 nt, synthetic construct
  source 1..18: mol_type = other RNA
tgcaagggtcacagtgtt

SEQ ID NO: 104 - RNA, 18 nt, synthetic construct
  source 1..18: mol_type = other RNA
catggttgttgagcaatc

SEQ ID NO: 105 - RNA, 18 nt, synthetic construct
  source 1..18: mol_type = other RNA
tttaacttgacttagtgt

SEQ ID NO: 106 - RNA, 18 nt, synthetic construct
  source 1..18: mol_type = other RNA
agtccctagctttccttt

SEQ ID NO: 107 - RNA, 18 nt, synthetic construct
  source 1..18: mol_type = other RNA
tgctgtgtcttggacatt

SEQ ID NO: 108 - RNA, 18 nt, synthetic construct
  source 1..18: mol_type = other RNA
gtccctagctttcctttc

SEQ ID NO: 109 - RNA, 18 nt, synthetic construct
  source 1..18: mol_type = other RNA
tcctccgaagtgaaagag

SEQ ID NO: 110 - RNA, 18 nt, synthetic construct
  source 1..18: mol_type = other RNA
atcttctgcatttggaag

SEQ ID NO: 111 - RNA, 18 nt, synthetic construct
  source 1..18: mol_type = other RNA
tggttgttgagcaatcct

SEQ ID NO: 112 - RNA, 18 nt, synthetic construct
  source 1..18: mol_type = other RNA
tactccttcccttcttgg

SEQ ID NO: 113 - RNA, 21 nt, synthetic construct
  source 1..21: mol_type = other RNA
gatgaaggacatggcttagaa

SEQ ID NO: 114 - RNA, 21 nt, synthetic construct
  source 1..21: mol_type = other RNA
taaaccaaactttttttgtaa

SEQ ID NO: 115 - RNA, 21 nt, synthetic construct
  source 1..21: mol_type = other RNA
gaagatgtagattgtgtgata

SEQ ID NO: 116 - RNA, 21 nt, synthetic construct
  source 1..21: mol_type = other RNA
gttgacttgagtaaatatata

SEQ ID NO: 117 - RNA, 21 nt, synthetic construct
  source 1..21: mol_type = other RNA
atcaagaatgacaatgtccaa

SEQ ID NO: 118 - RNA, 21 nt, synthetic construct
  source 1..21: mol_type = other RNA
tgttgacttgagtaaatataa

SEQ ID NO: 119 - RNA, 21 nt, synthetic construct
  source 1..21: mol_type = other RNA
gccaaaatagatgagatcaaa

SEQ ID NO: 120 - RNA, 21 nt, synthetic construct
  source 1..21: mol_type = other RNA
aatgcagaagatgtagattga

SEQ ID NO: 121 - RNA, 21 nt, synthetic construct
  source 1..21: mol_type = other RNA
gctttgttcgaaagaatggta

SEQ ID NO: 122 - RNA, 21 nt, synthetic construct
  source 1..21: mol_type = other RNA
gacttgagtaaatatatcaca

SEQ ID NO: 123 - RNA, 21 nt, synthetic construct
  source 1..21: mol_type = other RNA
agatgagatcaagaatgacaa

SEQ ID NO: 124 - RNA, 21 nt, synthetic construct
  source 1..21: mol_type = other RNA
ttgagtaaatatatcaccaca

SEQ ID NO: 125 - RNA, 21 nt, synthetic construct
  source 1..21: mol_type = other RNA
aatagatgagatcaagaatga

SEQ ID NO: 126 - RNA, 21 nt, synthetic construct
  source 1..21: mol_type = other RNA
ctttgttcgaaagaatggtga

SEQ ID NO: 127 - RNA, 21 nt, synthetic construct
  source 1..21: mol_type = other RNA
tgtgatgaaggacatggctta

SEQ ID NO: 128 - RNA, 21 nt, synthetic construct
  source 1..21: mol_type = other RNA
tgacttgagtaaatatatcaa

SEQ ID NO: 129 - RNA, 21 nt, synthetic construct
  source 1..21: mol_type = other RNA
gaaagttcaactgcttcgtaa

SEQ ID NO: 130 - RNA, 21 nt, synthetic construct
  source 1..21: mol_type = other RNA
gcagaagatgtagattgtgta

SEQ ID NO: 131 - RNA, 21 nt, synthetic construct
  source 1..21: mol_type = other RNA
tgtgaacactgtgacccttga

SEQ ID NO: 132 - RNA, 21 nt, synthetic construct
  source 1..21: mol_type = other RNA
gacactaagtcaagttaaaga

SEQ ID NO: 133 - RNA, 21 nt, synthetic construct
  source 1..21: mol_type = other RNA
gaataccaagtgcagatgtaa

SEQ ID NO: 134 - RNA, 21 nt, synthetic construct
  source 1..21: mol_type = other RNA
gacaatgtccaagacacagca

SEQ ID NO: 135 - RNA, 21 nt, synthetic construct
  source 1..21: mol_type = other RNA
atgaaggacatggcttagaaa

SEQ ID NO: 136 - RNA, 21 nt, synthetic construct
  source 1..21: mol_type = other RNA
ttccaaatgcagaagatgtaa

SEQ ID NO: 137 - RNA, 21 nt, synthetic construct
  source 1..21: mol_type = other RNA
gagatcaagaatgacaatgta

SEQ ID NO: 138 - RNA, 21 nt, synthetic construct
  source 1..21: mol_type = other RNA
caagtgcagatgtaaaccaaa

SEQ ID NO: 139 - RNA, 21 nt, synthetic construct
  source 1..21: mol_type = other RNA
tttgttcgaaagaatggtgta

SEQ ID NO: 140 - RNA, 21 nt, synthetic construct
  source 1..21: mol_type = other RNA
cagaagatgtagattgtgtga

SEQ ID NO: 141 - RNA, 21 nt, synthetic construct
  source 1..21: mol_type = other RNA
tctttgtactcttgcagagaa

SEQ ID NO: 142 - RNA, 21 nt, synthetic construct
  source 1..21: mol_type = other RNA
cactgtgacccttgcaccaaa

SEQ ID NO: 143 - RNA, 21 nt, synthetic construct
  source 1..21: mol_type = other RNA
tccaaatgcagaagatgtaga

SEQ ID NO: 144 - RNA, 21 nt, synthetic construct
  source 1..21: mol_type = other RNA
aatgtccaagacacagcagaa

SEQ ID NO: 145 - RNA, 21 nt, synthetic construct
  source 1..21: mol_type = other RNA
gccaagaagggaaggagtaca

SEQ ID NO: 146 - RNA, 21 nt, synthetic construct
  source 1..21: mol_type = other RNA
cttgagtaaatatatcaccaa

SEQ ID NO: 147 - RNA, 21 nt, synthetic construct
  source 1..21: mol_type = other RNA
tagatgagatcaagaatgaca

SEQ ID NO: 148 - RNA, 21 nt, synthetic construct
  source 1..21: mol_type = other RNA
ttgacttgagtaaatatatca

SEQ ID NO: 149 - RNA, 21 nt, synthetic construct
  source 1..21: mol_type = other RNA
agtaaatatatcaccactata

SEQ ID NO: 150 - RNA, 21 nt, synthetic construct
  source 1..21: mol_type = other RNA
taccaagtgcagatgtaaaca

SEQ ID NO: 151 - RNA, 21 nt, synthetic construct
  source 1..21: mol_type = other RNA
ctgtatgtgaacactgtgaca

SEQ ID NO: 152 - RNA, 21 nt, synthetic construct
  source 1..21: mol_type = other RNA
gatcaagaatgacaatgtcca

SEQ ID NO: 153 - RNA, 21 nt, synthetic construct
  source 1..21: mol_type = other RNA
atgacactaagtcaagttaaa

SEQ ID NO: 154 - RNA, 21 nt, synthetic construct
  source 1..21: mol_type = other RNA
aaatagatgagatcaagaata

SEQ ID NO: 155 - RNA, 21 nt, synthetic construct
  source 1..21: mol_type = other RNA
gtatgtgaacactgtgaccca

SEQ ID NO: 156 - RNA, 21 nt, synthetic construct
  source 1..21: mol_type = other RNA
aataccaagtgcagatgtaaa

SEQ ID NO: 157 - RNA, 21 nt, synthetic construct
  source 1..21: mol_type = other RNA
tgagatcaagaatgacaatga

SEQ ID NO: 158 - RNA, 21 nt, synthetic construct
  source 1..21: mol_type = other RNA
ctttgtactcttgcagagaaa

SEQ ID NO: 159 - RNA, 21 nt, synthetic construct
  source 1..21: mol_type = other RNA
tgaagccaaaatagatgagaa

SEQ ID NO: 160 - RNA, 21 nt, synthetic construct
  source 1..21: mol_type = other RNA
catcctcaaggacattactaa

SEQ ID NO: 161 - RNA, 21 nt, synthetic construct
  source 1..21: mol_type = other RNA
tatgtgaacactgtgacccta

SEQ ID NO: 162 - RNA, 21 nt, synthetic construct
  source 1..21: mol_type = other RNA
gtgttaatgcccaagtgacta

SEQ ID NO: 163 - RNA, 21 nt, synthetic construct
  source 1..21: mol_type = other RNA
ttcaactgcttcgtaattgga

SEQ ID NO: 164 - RNA, 21 nt, synthetic construct
  source 1..21: mol_type = other RNA
tgcagaagatgtagattgtga

SEQ ID NO: 165 - RNA, 21 nt, synthetic construct
  source 1..21: mol_type = other RNA
gagtaaatatatcaccactaa

SEQ ID NO: 166 - RNA, 21 nt, synthetic construct
  source 1..21: mol_type = other RNA
caaggaatgcacactcaccaa

SEQ ID NO: 167 - RNA, 21 nt, synthetic construct
  source 1..21: mol_type = other RNA
caggtgaaaggaaagctagga

SEQ ID NO: 168 - RNA, 21 nt, synthetic construct
  source 1..21: mol_type = other RNA
aatgacaatgtccaagacaca

SEQ ID NO: 169 - RNA, 21 nt, synthetic construct
  source 1..21: mol_type = other RNA
ggaatgcacactcaccagcaa

SEQ ID NO: 170 - RNA, 21 nt, synthetic construct
  source 1..21: mol_type = other RNA
cctgtcctccaggtgaaagga

SEQ ID NO: 171 - RNA, 21 nt, synthetic construct
  source 1..21: mol_type = other RNA
atgcagaagatgtagattgta

SEQ ID NO: 172 - RNA, 21 nt, synthetic construct
  source 1..21: mol_type = other RNA
ttgtgtgatgaaggacatgga

SEQ ID NO: 173 - RNA, 21 nt, synthetic construct
  source 1..21: mol_type = other RNA
aaagttcaactgcttcgtaaa

SEQ ID NO: 174 - RNA, 21 nt, synthetic construct
  source 1..21: mol_type = other RNA
tgttaatgcccaagtgactga

SEQ ID NO: 175 - RNA, 21 nt, synthetic construct
  source 1..21: mol_type = other RNA
gatgttgacttgagtaaataa

SEQ ID NO: 176 - RNA, 21 nt, synthetic construct
  source 1..21: mol_type = other RNA
gaagccaaaatagatgagata

SEQ ID NO: 177 - RNA, 21 nt, synthetic construct
  source 1..21: mol_type = other RNA
gttcaactgcttcgtaattga

SEQ ID NO: 178 - RNA, 21 nt, synthetic construct
  source 1..21: mol_type = other RNA
gtactcttgcagagaaaatta

SEQ ID NO: 179 - RNA, 21 nt, synthetic construct
  source 1..21: mol_type = other RNA
ctcaaggacattactagtgaa

SEQ ID NO: 180 - RNA, 21 nt, synthetic construct
  source 1..21: mol_type = other RNA
agggaaggagtacacagacaa

SEQ ID NO: 181 - RNA, 21 nt, synthetic construct
  source 1..21: mol_type = other RNA
tcatgacactaagtcaagtta

SEQ ID NO: 182 - RNA, 21 nt, synthetic construct
  source 1..21: mol_type = other RNA
cctcaaggacattactagtga

SEQ ID NO: 183 - RNA, 21 nt, synthetic construct
  source 1..21: mol_type = other RNA
ggctttgttcgaaagaatgga

SEQ ID NO: 184 - RNA, 21 nt, synthetic construct
  source 1..21: mol_type = other RNA
ccagactgcgtgccctgccaa

SEQ ID NO: 185 - RNA, 21 nt, synthetic construct
  source 1..21: mol_type = other RNA
agccaaaatagatgagatcaa

SEQ ID NO: 186 - RNA, 21 nt, synthetic construct
  source 1..21: mol_type = other RNA
agaagggaaggagtacacaga

SEQ ID NO: 187 - RNA, 21 nt, synthetic construct
  source 1..21: mol_type = other RNA
agattgtgtgatgaaggacaa

SEQ ID NO: 188 - RNA, 21 nt, synthetic construct
  source 1..21: mol_type = other RNA
tttcacttcggaggattgcta

SEQ ID NO: 189 - RNA, 21 nt, synthetic construct
  source 1..21: mol_type = other RNA
aaggaaagctagggactgcaa

SEQ ID NO: 190 - RNA, 21 nt, synthetic construct
  source 1..21: mol_type = other RNA
gacatggcttagaagtggaaa

SEQ ID NO: 191 - RNA, 21 nt, synthetic construct
  source 1..21: mol_type = other RNA
tgtactcttgcagagaaaata

SEQ ID NO: 192 - RNA, 21 nt, synthetic construct
  source 1..21: mol_type = other RNA
atgaaccagactgcgtgccca

SEQ ID NO: 193 - RNA, 21 nt, synthetic construct
  source 1..21: mol_type = other RNA
catgacactaagtcaagttaa

SEQ ID NO: 194 - RNA, 21 nt, synthetic construct
  source 1..21: mol_type = other RNA
ttgttcgaaagaatggtgtca

SEQ ID NO: 195 - RNA, 21 nt, synthetic construct
  source 1..21: mol_type = other RNA
acactgtgacccttgcaccaa

SEQ ID NO: 196 - RNA, 21 nt, synthetic construct
  source 1..21: mol_type = other RNA
ggaaataaactgcacccggaa

SEQ ID NO: 197 - RNA, 21 nt, synthetic construct
  source 1..21: mol_type = other RNA
aagtgttaatgcccaagtgaa

SEQ ID NO: 198 - RNA, 21 nt, synthetic construct
  source 1..21: mol_type = other RNA
agttcaactgcttcgtaatta

SEQ ID NO: 199 - RNA, 21 nt, synthetic construct
  source 1..21: mol_type = other RNA
cacttcggaggattgctcaaa

SEQ ID NO: 200 - RNA, 21 nt, synthetic construct
  source 1..21: mol_type = other RNA
atgaagccaaaatagatgaga

SEQ ID NO: 201 - RNA, 21 nt, synthetic construct
  source 1..21: mol_type = other RNA
acttcggaggattgctcaaca

SEQ ID NO: 202 - RNA, 21 nt, synthetic construct
  source 1..21: mol_type = other RNA
aggtgaaaggaaagctaggga

SEQ ID NO: 203 - RNA, 21 nt, synthetic construct
  source 1..21: mol_type = other RNA
aagggaaggagtacacagaca

SEQ ID NO: 204 - RNA, 21 nt, synthetic construct
  source 1..21: mol_type = other RNA
agtggaaataaactgcaccca

SEQ ID NO: 205 - RNA, 21 nt, synthetic construct
  source 1..21: mol_type = other RNA
atgacaatgtccaagacacaa

SEQ ID NO: 206 - RNA, 21 nt, synthetic construct
  source 1..21: mol_type = other RNA
gattgtgtgatgaaggacata

SEQ ID NO: 207 - RNA, 21 nt, synthetic construct
  source 1..21: mol_type = other RNA
ggggatgaaccagactgcgta

SEQ ID NO: 208 - RNA, 21 nt, synthetic construct
  source 1..21: mol_type = other RNA
gttaatgcccaagtgactgaa

SEQ ID NO: 209 - RNA, 21 nt, synthetic construct
  source 1..21: mol_type = other RNA
accagactgcgtgccctgcca

SEQ ID NO: 210 - RNA, 21 nt, synthetic construct
  source 1..21: mol_type = other RNA
aacactgtgacccttgcacca

SEQ ID NO: 211 - RNA, 21 nt, synthetic construct
  source 1..21: mol_type = other RNA
ggaaggagtacacagacaaaa

SEQ ID NO: 212 - RNA, 21 nt, synthetic construct
  source 1..21: mol_type = other RNA
gggatgaaccagactgcgtga

SEQ ID NO: 213 - RNA, 21 nt, synthetic construct
  source 1..21: mol_type = other RNA
ctgcgtgccctgccaagaaga

SEQ ID NO: 214 - RNA, 21 nt, synthetic construct
  source 1..21: mol_type = other RNA
tgaacactgtgacccttgcaa

SEQ ID NO: 215 - RNA, 21 nt, synthetic construct
  source 1..21: mol_type = other RNA
aggattgctcaacaaccatga

SEQ ID NO: 216 - RNA, 21 nt, synthetic construct
  source 1..21: mol_type = other RNA
tgacactaagtcaagttaaaa

SEQ ID NO: 217 - RNA, 21 nt, synthetic construct
  source 1..21: mol_type = other RNA
tgaaaggaaagctagggacta

SEQ ID NO: 218 - RNA, 21 nt, synthetic construct
  source 1..21: mol_type = other RNA
acaatgtccaagacacagcaa

SEQ ID NO: 219 - RNA, 21 nt, synthetic construct
  source 1..21: mol_type = other RNA
gtgaaaggaaagctagggaca

SEQ ID NO: 220 - RNA, 21 nt, synthetic construct
  source 1..21: mol_type = other RNA
agctctttcacttcggaggaa

SEQ ID NO: 221 - RNA, 21 nt, synthetic construct
  source 1..21: mol_type = other RNA
ttcttccaaatgcagaagata

SEQ ID NO: 222 - RNA, 21 nt, synthetic construct
  source 1..21: mol_type = other RNA
ggaggattgctcaacaaccaa

SEQ ID NO: 223 - RNA, 21 nt, synthetic construct
  source 1..21: mol_type = other RNA
tgccaagaagggaaggagtaa

SEQ ID NO: 224 - RNA, 23 nt, synthetic construct
  source 1..23: mol_type = other RNA
ttctaagccatgtccttcatcac

SEQ ID NO: 225 - RNA, 23 nt, synthetic construct
  source 1..23: mol_type = other RNA
ttacaaaaaaagtttggtttaca

SEQ ID NO: 226 - RNA, 23 nt, synthetic construct
  source 1..23: mol_type = other RNA
tatcacacaatctacatcttctg

SEQ ID NO: 227 - RNA, 23 nt, synthetic construct
  source 1..23: mol_type = other RNA
tatatatttactcaagtcaacat

SEQ ID NO: 228 - RNA, 23 nt, synthetic construct
  source 1..23: mol_type = other RNA
ttggacattgtcattcttgatct

SEQ ID NO: 229 - RNA, 23 nt, synthetic construct
  source 1..23: mol_type = other RNA
ttatatttactcaagtcaacatc

SEQ ID NO: 230 - RNA, 23 nt, synthetic construct
  source 1..23: mol_type = other RNA
tttgatctcatctattttggctt

SEQ ID NO: 231 - RNA, 23 nt, synthetic construct
  source 1..23: mol_type = other RNA
tcaatctacatcttctgcatttg

SEQ ID NO: 232 - RNA, 23 nt, synthetic construct
  source 1..23: mol_type = other RNA
taccattctttcgaacaaagcct

SEQ ID NO: 233 - RNA, 23 nt, synthetic construct
  source 1..23: mol_type = other RNA
tgtgatatatttactcaagtcaa

SEQ ID NO: 234 - RNA, 23 nt, synthetic construct
  source 1..23: mol_type = other RNA
ttgtcattcttgatctcatctat

SEQ ID NO: 235 - RNA, 23 nt, synthetic construct
  source 1..23: mol_type = other RNA
tgtggtgatatatttactcaagt

SEQ ID NO: 236 - RNA, 23 nt, synthetic construct
  source 1..23: mol_type = other RNA
tcattcttgatctcatctatttt

SEQ ID NO: 237 - RNA, 23 nt, synthetic construct
  source 1..23: mol_type = other RNA
tcaccattctttcgaacaaagcc

SEQ ID NO: 238 - RNA, 23 nt, synthetic construct
  source 1..23: mol_type = other RNA
taagccatgtccttcatcacaca

SEQ ID NO: 239 - RNA, 23 nt, synthetic construct
  source 1..23: mol_type = other RNA
ttgatatatttactcaagtcaac

SEQ ID NO: 240 - RNA, 23 nt, synthetic construct
  source 1..23: mol_type = other RNA
ttacgaagcagttgaactttctg

SEQ ID NO: 241 - RNA, 23 nt, synthetic construct
  source 1..23: mol_type = other RNA
tacacaatctacatcttctgcat

SEQ ID NO: 242 - RNA, 23 nt, synthetic construct
  source 1..23: mol_type = other RNA
tcaagggtcacagtgttcacata

SEQ ID NO: 243 - RNA, 23 nt, synthetic construct
  source 1..23: mol_type = other RNA
tctttaacttgacttagtgtcat

SEQ ID NO: 244 - RNA, 23 nt, synthetic construct
  source 1..23: mol_type = other RNA
ttacatctgcacttggtattctg

SEQ ID NO: 245 - RNA, 23 nt, synthetic construct
  source 1..23: mol_type = other RNA
tgctgtgtcttggacattgtcat

SEQ ID NO: 246 - RNA, 23 nt, synthetic construct
  source 1..23: mol_type = other RNA
tttctaagccatgtccttcatca

SEQ ID NO: 247 - RNA, 23 nt, synthetic construct
  source 1..23: mol_type = other RNA
ttacatcttctgcatttggaaga

SEQ ID NO: 248 - RNA, 23 nt, synthetic construct
  source 1..23: mol_type = other RNA
tacattgtcattcttgatctcat

SEQ ID NO: 249 - RNA, 23 nt, synthetic construct
  source 1..23: mol_type = other RNA
tttggtttacatctgcacttggt

SEQ ID NO: 250 - RNA, 23 nt, synthetic construct
  source 1..23: mol_type = other RNA
tacaccattctttcgaacaaagc

SEQ ID NO: 251 - RNA, 23 nt, synthetic construct
  source 1..23: mol_type = other RNA
tcacacaatctacatcttctgca

SEQ ID NO: 252 - RNA, 23 nt, synthetic construct
  source 1..23: mol_type = other RNA
ttctctgcaagagtacaaagatt

SEQ ID NO: 253 - RNA, 23 nt, synthetic construct
  source 1..23: mol_type = other RNA
tttggtgcaagggtcacagtgtt

SEQ ID NO: 254 - RNA, 23 nt, synthetic construct
  source 1..23: mol_type = other RNA
tctacatcttctgcatttggaag

SEQ ID NO: 255 - RNA, 23 nt, synthetic construct
  source 1..23: mol_type = other RNA
ttctgctgtgtcttggacattgt

SEQ ID NO: 256 - RNA, 23 nt, synthetic construct
  source 1..23: mol_type = other RNA
tgtactccttcccttcttggcag

SEQ ID NO: 257 - RNA, 23 nt, synthetic construct
  source 1..23: mol_type = other RNA
ttggtgatatatttactcaagtc

SEQ ID NO: 258 - RNA, 23 nt, synthetic construct
  source 1..23: mol_type = other RNA
tgtcattcttgatctcatctatt

SEQ ID NO: 259 - RNA, 23 nt, synthetic construct
  source 1..23: mol_type = other RNA
tgatatatttactcaagtcaaca

SEQ ID NO: 260 - RNA, 23 nt, synthetic construct
  source 1..23: mol_type = other RNA
tatagtggtgatatatttactca

SEQ ID NO: 261 - RNA, 23 nt, synthetic construct
  source 1..23: mol_type = other RNA
tgtttacatctgcacttggtatt

SEQ ID NO: 262 - RNA, 23 nt, synthetic construct
  source 1..23: mol_type = other RNA
tgtcacagtgttcacatacagta

SEQ ID NO: 263 - RNA, 23 nt, synthetic construct
  source 1..23: mol_type = other RNA
tggacattgtcattcttgatctc

SEQ ID NO: 264 - RNA, 23 nt, synthetic construct
  source 1..23: mol_type = other RNA
tttaacttgacttagtgtcatga

SEQ ID NO: 265 - RNA, 23 nt, synthetic construct
  source 1..23: mol_type = other RNA
tattcttgatctcatctattttg

SEQ ID NO: 266 - RNA, 23 nt, synthetic construct
  source 1..23: mol_type = other RNA
tgggtcacagtgttcacatacag

SEQ ID NO: 267 - RNA, 23 nt, synthetic construct
  source 1..23: mol_type = other RNA
tttacatctgcacttggtattct

SEQ ID NO: 268 - RNA, 23 nt, synthetic construct
  source 1..23: mol_type = other RNA
tcattgtcattcttgatctcatc

SEQ ID NO: 269 - RNA, 23 nt, synthetic construct
  source 1..23: mol_type = other RNA
tttctctgcaagagtacaaagat

SEQ ID NO: 270 - RNA, 23 nt, synthetic construct
  source 1..23: mol_type = other RNA
ttctcatctattttggcttcatt

SEQ ID NO: 271 - RNA, 23 nt, synthetic construct
  source 1..23: mol_type = other RNA
ttagtaatgtccttgaggatgat

SEQ ID NO: 272 - RNA, 23 nt, synthetic construct
  source 1..23: mol_type = other RNA
tagggtcacagtgttcacataca

SEQ ID NO: 273 - RNA, 23 nt, synthetic construct
  source 1..23: mol_type = other RNA
tagtcacttgggcattaacactt

SEQ ID NO: 274 - RNA, 23 nt, synthetic construct
  source 1..23: mol_type = other RNA
tccaattacgaagcagttgaact

SEQ ID NO: 275 - RNA, 23 nt, synthetic construct
  source 1..23: mol_type = other RNA
tcacaatctacatcttctgcatt

SEQ ID NO: 276 - RNA, 23 nt, synthetic construct
  source 1..23: mol_type = other RNA
ttagtggtgatatatttactcaa

SEQ ID NO: 277 - RNA, 23 nt, synthetic construct
  source 1..23: mol_type = other RNA
ttggtgagtgtgcattccttgat

SEQ ID NO: 278 - RNA, 23 nt, synthetic construct
  source 1..23: mol_type = other RNA
tcctagctttcctttcacctgga

SEQ ID NO: 279 - RNA, 23 nt, synthetic construct
  source 1..23: mol_type = other RNA
tgtgtcttggacattgtcattct

SEQ ID NO: 280 - RNA, 23 nt, synthetic construct
  source 1..23: mol_type = other RNA
ttgctggtgagtgtgcattcctt

SEQ ID NO: 281 - RNA, 23 nt, synthetic construct
  source 1..23: mol_type = other RNA
tcctttcacctggaggacagggc

SEQ ID NO: 282 - RNA, 23 nt, synthetic construct
  source 1..23: mol_type = other RNA
tacaatctacatcttctgcattt

SEQ ID NO: 283 - RNA, 23 nt, synthetic construct
  source 1..23: mol_type = other RNA
tccatgtccttcatcacacaatc

SEQ ID NO: 284 - RNA, 23 nt, synthetic construct
  source 1..23: mol_type = other RNA
tttacgaagcagttgaactttct

SEQ ID NO: 285 - RNA, 23 nt, synthetic construct
  source 1..23: mol_type = other RNA
tcagtcacttgggcattaacact

SEQ ID NO: 286 - RNA, 23 nt, synthetic construct
  source 1..23: mol_type = other RNA
ttatttactcaagtcaacatcag

SEQ ID NO: 287 - RNA, 23 nt, synthetic construct
  source 1..23: mol_type = other RNA
tatctcatctattttggcttcat

SEQ ID NO: 288 - RNA, 23 nt, synthetic construct
  source 1..23: mol_type = other RNA
tcaattacgaagcagttgaactt

SEQ ID NO: 289 - RNA, 23 nt, synthetic construct
  source 1..23: mol_type = other RNA
taattttctctgcaagagtacaa

SEQ ID NO: 290 - RNA, 23 nt, synthetic construct
  source 1..23: mol_type = other RNA
ttcactagtaatgtccttgagga

SEQ ID NO: 291 - RNA, 23 nt, synthetic construct
  source 1..23: mol_type = other RNA
ttgtctgtgtactccttcccttc

SEQ ID NO: 292 - RNA, 23 nt, synthetic construct
  source 1..23: mol_type = other RNA
taacttgacttagtgtcatgact

SEQ ID NO: 293 - RNA, 23 nt, synthetic construct
  source 1..23: mol_type = other RNA
tcactagtaatgtccttgaggat

SEQ ID NO: 294 - RNA, 23 nt, synthetic construct
  source 1..23: mol_type = other RNA
tccattctttcgaacaaagcctt

SEQ ID NO: 295 - RNA, 23 nt, synthetic construct
  source 1..23: mol_type = other RNA
ttggcagggcacgcagtctggtt

SEQ ID NO: 296 - RNA, 23 nt, synthetic construct
  source 1..23: mol_type = other RNA
ttgatctcatctattttggcttc

SEQ ID NO: 297 - RNA, 23 nt, synthetic construct
  source 1..23: mol_type = other RNA
tctgtgtactccttcccttcttg

SEQ ID NO: 298 - RNA, 23 nt, synthetic construct
  source 1..23: mol_type = other RNA
ttgtccttcatcacacaatctac

SEQ ID NO: 299 - RNA, 23 nt, synthetic construct
  source 1..23: mol_type = other RNA
tagcaatcctccgaagtgaaaga

SEQ ID NO: 300 - RNA, 23 nt, synthetic construct
  source 1..23: mol_type = other RNA
ttgcagtccctagctttcctttc

SEQ ID NO: 301 - RNA, 23 nt, synthetic construct
  source 1..23: mol_type = other RNA
tttccacttctaagccatgtcct

SEQ ID NO: 302 - RNA, 23 nt, synthetic construct
  source 1..23: mol_type = other RNA
tattttctctgcaagagtacaaa

SEQ ID NO: 303 - RNA, 23 nt, synthetic construct
  source 1..23: mol_type = other RNA
tgggcacgcagtctggttcatcc

SEQ ID NO: 304 - RNA, 23 nt, synthetic construct
  source 1..23: mol_type = other RNA
ttaacttgacttagtgtcatgac

SEQ ID NO: 305 - RNA, 23 nt, synthetic construct
  source 1..23: mol_type = other RNA
tgacaccattctttcgaacaaag

SEQ ID NO: 306 - RNA, 23 nt, synthetic construct
  source 1..23: mol_type = other RNA
ttggtgcaagggtcacagtgttc

SEQ ID NO: 307 - RNA, 23 nt, synthetic construct
  source 1..23: mol_type = other RNA
ttccgggtgcagtttatttccac

SEQ ID NO: 308 - RNA, 23 nt, synthetic construct
  source 1..23: mol_type = other RNA
ttcacttgggcattaacactttt

SEQ ID NO: 309 - RNA, 23 nt, synthetic construct
  source 1..23: mol_type = other RNA
taattacgaagcagttgaacttt

SEQ ID NO: 310 - RNA, 23 nt, synthetic construct
  source 1..23: mol_type = other RNA
tttgagcaatcctccgaagtgaa

SEQ ID NO: 311 - RNA, 23 nt, synthetic construct
  source 1..23: mol_type = other RNA
tctcatctattttggcttcattg

SEQ ID NO: 312 - RNA, 23 nt, synthetic construct
  source 1..23: mol_type = other RNA
tgttgagcaatcctccgaagtga

SEQ ID NO: 313 - RNA, 23 nt, synthetic construct
  source 1..23: mol_type = other RNA
tccctagctttcctttcacctgg

SEQ ID NO: 314 - RNA, 23 nt, synthetic construct
  source 1..23: mol_type = other RNA
tgtctgtgtactccttcccttct

SEQ ID NO: 315 - RNA, 23 nt, synthetic construct
  source 1..23: mol_type = other RNA
tgggtgcagtttatttccacttc

SEQ ID NO: 316 - RNA, 23 nt, synthetic construct
  source 1..23: mol_type = other RNA
ttgtgtcttggacattgtcattc

SEQ ID NO: 317 - RNA, 23 nt, synthetic construct
  source 1..23: mol_type = other RNA
tatgtccttcatcacacaatcta

SEQ ID NO: 318 - RNA, 23 nt, synthetic construct
  source 1..23: mol_type = other RNA
tacgcagtctggttcatccccat

SEQ ID NO: 319 - RNA, 23 nt, synthetic construct
  source 1..23: mol_type = other RNA
ttcagtcacttgggcattaacac

SEQ ID NO: 320 - RNA, 23 nt, synthetic construct
  source 1..23: mol_type = other RNA
tggcagggcacgcagtctggttc

SEQ ID NO: 321 - RNA, 23 nt, synthetic construct
  source 1..23: mol_type = other RNA
tggtgcaagggtcacagtgttca

SEQ ID NO: 322 - RNA, 23 nt, synthetic construct
  source 1..23: mol_type = other RNA
ttttgtctgtgtactccttccct

SEQ ID NO: 323 - RNA, 23 nt, synthetic construct
  source 1..23: mol_type = other RNA
tcacgcagtctggttcatcccca

SEQ ID NO: 324 - RNA, 23 nt, synthetic construct
  source 1..23: mol_type = other RNA
tcttcttggcagggcacgcagtc

SEQ ID NO: 325 - RNA, 23 nt, synthetic construct
  source 1..23: mol_type = other RNA
ttgcaagggtcacagtgttcaca

SEQ ID NO: 326 - RNA, 23 nt, synthetic construct
  source 1..23: mol_type = other RNA
tcatggttgttgagcaatcctcc

SEQ ID NO: 327 - RNA, 23 nt, synthetic construct
  source 1..23: mol_type = other RNA
ttttaacttgacttagtgtcatg

SEQ ID NO: 328 - RNA, 23 nt, synthetic construct
  source 1..23: mol_type = other RNA
tagtccctagctttcctttcacc

SEQ ID NO: 329 - RNA, 23 nt, synthetic construct
  source 1..23: mol_type = other RNA
ttgctgtgtcttggacattgtca

SEQ ID NO: 330 - RNA, 23 nt, synthetic construct
  source 1..23: mol_type = other RNA
tgtccctagctttcctttcacct

SEQ ID NO: 331 - RNA, 23 nt, synthetic construct
  source 1..23: mol_type = other RNA
ttcctccgaagtgaaagagcttc

SEQ ID NO: 332 - RNA, 23 nt, synthetic construct
  source 1..23: mol_type = other RNA
tatcttctgcatttggaagaaaa

SEQ ID NO: 333 - RNA, 23 nt, synthetic construct
  source 1..23: mol_type = other RNA
ttggttgttgagcaatcctccga

SEQ ID NO: 334 - RNA, 23 nt, synthetic construct
  source 1..23: mol_type = other RNA
ttactccttcccttcttggcagg

SEQ ID NO: 335 - RNA, 21 nt, synthetic construct
  source 1..21: mol_type = other RNA
  modified_base 10: mod_base = OTHER; note = Abasic site
gaaagttcanctgcttcgtaa

SEQ ID NO: 336 - RNA, 21 nt, synthetic construct
  source 1..21: mol_type = other RNA
  modified_base 10: mod_base = OTHER; note = Abasic site
gttgacttgngtaaatatata

SEQ ID NO: 337 - RNA, 23 nt, synthetic construct
  source 1..23: mol_type = other RNA
  modified_base 6: mod_base = OTHER; note = Glycol nucleic acid
tatatatttactcaagtcaacat

SEQ ID NO: 338 - RNA, 23 nt, synthetic construct
  source 1..23: mol_type = other RNA
  modified_base 7: mod_base = OTHER; note = Glycol nucleic acid
tatatatttactcaagtcaacat

SEQ ID NO: 339 - RNA, 21 nt, synthetic construct
  source 1..21: mol_type = other RNA
  modified_base 1: mod_base = OTHER; note = 2'-O-methylguanosine with a 3'-phosphorothioate linkage
  modified_base 2: mod_base = OTHER; note = 2'-O-methyladenosine with a 3'-phosphorothioate linkage
  modified_base 3: mod_base = um
  modified_base 4: mod_base = gm
  modified_base 5: mod_base = OTHER; note = 2'-O-methyladenosine
  modified_base 6: mod_base = OTHER; note = 2'-O-methyladenosine
  modified_base 7: mod_base = OTHER; note = 2'-fluoroguanosine
  modified_base 8: mod_base = gm
  modified_base 9: mod_base = OTHER; note = 2'-fluoroadenosine
  modified_base 10: mod_base = OTHER; note = 2'-fluorocytidine
  modified_base 11: mod_base = OTHER; note = 2'-fluoroadenosine
  modified_base 12: mod_base = um
  modified_base 13: mod_base = gm
  modified_base 14: mod_base = gm
  modified_base 15: mod_base = cm
  modified_base 16: mod_base = um
  modified_base 17: mod_base = um
  modified_base 18: mod_base = OTHER; note = 2'-O-methyladenosine
  modified_base 19: mod_base = OTHER; note = 2'-O-methylguanosine with a 3'-phosphorothioate linkage
  modified_base 20: mod_base = OTHER; note = 2'-O-methyladenosine with a 3'-phosphorothioate linkage
  modified_base 21: mod_base = OTHER; note = 2'-O-methyladenosine with a 3'-phosphate substitution
gatgaaggacatggcttagaa

SEQ ID NO: 340 - RNA, 23 nt, synthetic construct
  source 1..23: mol_type = other RNA
  modified_base 1: mod_base = OTHER; note = 2'-O-methyluridine with a 3'-phosphorothioate linkage and a 5'-phosphate substitution
  modified_base 2: mod_base = OTHER; note = 2'-fluorouridine with a 3'-phosphorothioate linkage
  modified_base 3: mod_base = cm
  modified_base 4: mod_base = um
  modified_base 5: mod_base = OTHER; note = 2'-O-methyladenosine
  modified_base 6: mod_base = OTHER; note = 2'-fluoroadenosine
  modified_base 7: mod_base = gm
  modified_base 8: mod_base = cm
  modified_base 9: mod_base = cm
  modified_base 10: mod_base = OTHER; note = 2'-O-methyladenosine
  modified_base 11: mod_base = um
  modified_base 12: mod_base = gm
  modified_base 13: mod_base = um
  modified_base 14: mod_base = OTHER; note = 2'-fluorocytidine
  modified_base 15: mod_base = cm
  modified_base 16: mod_base = OTHER; note = 2'-fluorouridine
  modified_base 17: mod_base = um
  modified_base 18: mod_base = cm
  modified_base 19: mod_base = OTHER; note = 2'-O-methyladenosine
  modified_base 20: mod_base = um
  modified_base 21: mod_base = OTHER; note = 2'-O-methylcytidine with a 3'-phosphorothioate linkage
  modified_base 22: mod_base = OTHER; note = 2'-O-methyladenosine with a 3'-phosphorothioate linkage
  modified_base 23: mod_base = cm
ttctaagccatgtccttcatcac

SEQ ID NO: 341 - RNA, 21 nt, synthetic construct
  source 1..21: mol_type = other RNA
  modified_base 1: mod_base = OTHER; note = 2'-O-methyluridine with a 3'-phosphorothioate linkage
  modified_base 2: mod_base = OTHER; note = 2'-O-methyladenosine with a 3'-phosphorothioate linkage
  modified_base 3: mod_base = OTHER; note = 2'-O-methyladenosine
  modified_base 4: mod_base = OTHER; note = 2'-O-methyladenosine
  modified_base 5: mod_base = cm
  modified_base 6: mod_base = cm
  modified_base 7: mod_base = OTHER; note = 2'-fluoroadenosine
  modified_base 8: mod_base = OTHER; note = 2'-O-methyladenosine
  modified_base 9: mod_base = OTHER; note = 2'-fluoroadenosine
  modified_base 10: mod_base = OTHER; note = 2'-fluorocytidine
  modified_base 11: mod_base = OTHER; note = 2'-fluorouridine
  modified_base 12: mod_base = um
  modified_base 13: mod_base = um
  modified_base 14: mod_base = um
  modified_base 15: mod_base = um
  modified_base 16: mod_base = um
  modified_base 17: mod_base = um
  modified_base 18: mod_base = gm
  modified_base 19: mod_base = OTHER; note = 2'-O-methyluridine with a 3'-phosphorothioate linkage
  modified_base 20: mod_base = OTHER; note = 2'-O-methyladenosine with a 3'-phosphorothioate linkage
  modified_base 21: mod_base = OTHER; note = 2'-O-methyladenosine with a 3'-phosphate substitution
taaaccaaactttttttgtaa

SEQ ID NO: 342 - RNA, 23 nt, synthetic construct
  source 1..23: mol_type = other RNA
  modified_base 1: mod_base = OTHER; note = 2'-O-methyluridine with a 3'-phosphorothioate linkage and a 5'-phosphate substitution
  modified_base 2: mod_base = OTHER; note = 2'-fluorouridine with a 3'-phosphorothioate linkage
  modified_base 3: mod_base = OTHER; note = 2'-O-methyladenosine
  modified_base 4: mod_base = cm
  modified_base 5: mod_base = OTHER; note = 2'-O-methyladenosine
  modified_base 6: mod_base = OTHER; note = 2'-fluoroadenosine
  modified_base 7: mod_base = OTHER; note = 2'-O-methyladenosine
  modified_base 8: mod_base = OTHER; note = 2'-O-methyladenosine
  modified_base 9: mod_base = OTHER; note = 2'-O-methyladenosine
  modified_base 10: mod_base = OTHER; note = 2'-O-methyladenosine
  modified_base 11: mod_base = OTHER; note = 2'-O-methyladenosine
  modified_base 12: mod_base = gm
  modified_base 13: mod_base = um
  modified_base 14: mod_base = OTHER; note = 2'-fluorouridine
  modified_base 15: mod_base = um
  modified_base 16: mod_base = OTHER; note = 2'-fluoroguanosine
  modified_base 17: mod_base = gm
  modified_base 18: mod_base = um
  modified_base 19: mod_base = um
  modified_base 20: mod_base = um
  modified_base 21: mod_base = OTHER; note = 2'-O-methyladenosine with a 3'-phosphorothioate linkage
  modified_base 22: mod_base = OTHER; note = 2'-O-methylcytidine with a 3'-phosphorothioate linkage
  modified_base 23: mod_base = OTHER; note = 2'-O-methyladenosine
ttacaaaaaaagtttggtttaca

SEQ ID NO: 343 - RNA, 21 nt, synthetic construct
  source 1..21: mol_type = other RNA
  modified_base 1: mod_base = OTHER; note = 2'-O-methylguanosine with a 3'-phosphorothioate linkage
  modified_base 2: mod_base = OTHER; note = 2'-O-methyladenosine with a 3'-phosphorothioate linkage
  modified_base 3: mod_base = OTHER; note = 2'-O-methyladenosine
  modified_base 4: mod_base = gm
  modified_base 5: mod_base = OTHER; note = 2'-O-methyladenosine
  modified_base 6: mod_base = um
  modified_base 7: mod_base = OTHER; note = 2'-fluoroguanosine
  modified_base 8: mod_base = um
  modified_base 9: mod_base = OTHER; note = 2'-fluoroadenosine
  modified_base 10: mod_base = OTHER; note = 2'-fluoroguanosine
  modified_base 11: mod_base = OTHER; note = 2'-fluoroadenosine
  modified_base 12: mod_base = um
  modified_base 13: mod_base = um
  modified_base 14: mod_base = gm
  modified_base 15: mod_base = um
  modified_base 16: mod_base = gm
  modified_base 17: mod_base = um
  modified_base 18: mod_base = gm
  modified_base 19: mod_base = OTHER; note = 2'-O-methyladenosine with a 3'-phosphorothioate linkage
  modified_base 20: mod_base = OTHER; note = 2'-O-methyluridine with a 3'-phosphorothioate linkage
  modified_base 21: mod_base = OTHER; note = 2'-O-methyladenosine with a 3'-phosphate substitution
gaagatgtagattgtgtgata

SEQ ID NO: 344 - RNA, 23 nt, synthetic construct
  source 1..23: mol_type = other RNA
  modified_base 1: mod_base = OTHER; note = 2'-O-methyluridine with a 3'-phosphorothioate linkage and a 5'-phosphate substitution
  modified_base 2: mod_base = OTHER; note = 2'-fluoroadenosine with a 3'-phosphorothioate linkage
  modified_base 3: mod_base = um
  modified_base 4: mod_base = cm
  modified_base 5: mod_base = OTHER; note = 2'-O-methyladenosine
  modified_base 6: mod_base = OTHER; note = 2'-fluorocytidine
  modified_base 7: mod_base = OTHER; note = 2'-O-methyladenosine
  modified_base 8: mod_base = cm
  modified_base 9: mod_base = OTHER; note = 2'-O-methyladenosine
  modified_base 10: mod_base = OTHER; note = 2'-O-methyladenosine
  modified_base 11: mod_base = um
  modified_base 12: mod_base = cm
  modified_base 13: mod_base = um
  modified_base 14: mod_base = OTHER; note = 2'-fluoroadenosine
  modified_base 15: mod_base = cm
  modified_base 16: mod_base = OTHER; note = 2'-fluoroadenosine
  modified_base 17: mod_base = um
  modified_base 18: mod_base = cm
  modified_base 19: mod_base = um
  modified_base 20: mod_base = um
  modified_base 21: mod_base = OTHER; note = 2'-O-methylcytidine with a 3'-phosphorothioate linkage
  modified_base 22: mod_base = OTHER; note = 2'-O-methyluridine with a 3'-phosphorothioate linkage
  modified_base 23: mod_base = gm
tatcacacaatctacatcttctg

SEQ ID NO: 345 - RNA, 21 nt, synthetic construct
  source 1..21: mol_type = other RNA
  modified_base 1: mod_base = OTHER; note = 2'-O-methylguanosine with a 3'-phosphorothioate linkage
  modified_base 2: mod_base = OTHER; note = 2'-O-methyluridine with a 3'-phosphorothioate linkage
  modified_base 3: mod_base = um
  modified_base 4: mod_base = gm
  modified_base 5: mod_base = OTHER; note = 2'-O-methyladenosine
  modified_base 6: mod_base = cm
  modified_base 7: mod_base = OTHER; note = 2'-fluorouridine
  modified_base 8: mod_base = um
  modified_base 9: mod_base = OTHER; note = 2'-fluoroguanosine
  modified_base 10: mod_base = OTHER; note = 2'-fluoroadenosine
  modified_base 11: mod_base = OTHER; note = 2'-fluoroguanosine
  modified_base 12: mod_base = um
  modified_base 13: mod_base = OTHER; note = 2'-O-methyladenosine
  modified_base 14: mod_base = OTHER; note = 2'-O-methyladenosine
  modified_base 15: mod_base = OTHER; note = 2'-O-methyladenosine
  modified_base 16: mod_base = um
  modified_base 17: mod_base = OTHER; note = 2'-O-methyladenosine
  modified_base 18: mod_base = um
  modified_base 19: mod_base = OTHER; note = 2'-O-methyladenosine with a 3'-phosphorothioate linkage
  modified_base 20: mod_base = OTHER; note = 2'-O-methyluridine with a 3'-phosphorothioate linkage
  modified_base 21: mod_base = OTHER; note = 2'-O-methyladenosine with a 3'-phosphate substitution
gttgacttgagtaaatatata

SEQ ID NO: 346 - RNA, 23 nt, synthetic construct
  source 1..23: mol_type = other RNA
  modified_base 1: mod_base = OTHER; note = 2'-O-methyluridine with a 3'-phosphorothioate linkage and a 5'-phosphate substitution
  modified_base 2: mod_base = OTHER; note = 2'-fluoroadenosine with a 3'-phosphorothioate linkage
  modified_base 3: mod_base = um
  modified_base 4: mod_base = OTHER; note = 2'-O-methyladenosine
  modified_base 5: mod_base = um
  modified_base 6: mod_base = OTHER; note = 2'-fluoroadenosine
  modified_base 7: mod_base = um
  modified_base 8: mod_base = um
  modified_base 9: mod_base = um
  modified_base 10: mod_base = OTHER; note = 2'-O-methyladenosine
  modified_base 11: mod_base = cm
  modified_base 12: mod_base = um
  modified_base 13: mod_base = cm
  modified_base 14: mod_base = OTHER; note = 2'-fluoroadenosine
  modified_base 15: mod_base = OTHER; note = 2'-O-methyladenosine
  modified_base 16: mod_base = OTHER; note = 2'-fluoroguanosine
  modified_base 17: mod_base = um
  modified_base 18: mod_base = cm
  modified_base 19: mod_base = OTHER; note = 2'-O-methyladenosine
  modified_base 20: mod_base = OTHER; note = 2'-O-methyladenosine
  modified_base 21: mod_base = OTHER; note = 2'-O-methylcytidine with a 3'-phosphorothioate linkage
  modified_base 22: mod_base = OTHER; note = 2'-O-methyladenosine with a 3'-phosphorothioate linkage
  modified_base 23: mod_base = um
tatatatttactcaagtcaacat

SEQ ID NO: 347 - RNA, 21 nt, synthetic construct
  source 1..21: mol_type = other RNA
  modified_base 1: mod_base = OTHER; note = 2'-O-methyladenosine with a 3'-phosphorothioate linkage
  modified_base 2: mod_base = OTHER; note = 2'-O-methyluridine with a 3'-phosphorothioate linkage
  modified_base 3: mod_base = cm
  modified_base 4: mod_base = OTHER; note = 2'-O-methyladenosine
  modified_base 5: mod_base = OTHER; note = 2'-O-methyladenosine
  modified_base 6: mod_base = gm
  modified_base 7: mod_base = OTHER; note = 2'-fluoroadenosine
  modified_base 8: mod_base = OTHER; note = 2'-O-methyladenosine
  modified_base 9: mod_base = OTHER; note = 2'-fluorouridine
  modified_base 10: mod_base = OTHER; note = 2'-fluoroguanosine
  modified_base 11: mod_base = OTHER; note = 2'-fluoroadenosine
  modified_base 12: mod_base = cm
  modified_base 13: mod_base = OTHER; note = 2'-O-methyladenosine
  modified_base 14: mod_base = OTHER; note = 2'-O-methyladenosine
  modified_base 15: mod_base = um
  modified_base 16: mod_base = gm
  modified_base 17: mod_base = um
  modified_base 18: mod_base = cm
  modified_base 19: mod_base = OTHER; note = 2'-O-methylcytidine with a 3'-phosphorothioate linkage
  modified_base 20: mod_base = OTHER; note = 2'-O-methyladenosine with a 3'-phosphorothioate linkage
  modified_base 21: mod_base = OTHER; note = 2'-O-methyladenosine with a 3'-phosphate substitution
atcaagaatgacaatgtccaa

SEQ ID NO: 348 - RNA, 23 nt, synthetic construct
  source 1..23: mol_type = other RNA
  modified_base 1: mod_base = OTHER; note = 2'-O-methyluridine with a 3'-phosphorothioate linkage and a 5'-phosphate substitution
  modified_base 2: mod_base = OTHER; note = 2'-fluorouridine with a 3'-phosphorothioate linkage
  modified_base 3: mod_base = gm
  modified_base 4: mod_base = gm
  modified_base 5: mod_base = OTHER; note = 2'-O-methyladenosine
  modified_base 6: mod_base = OTHER; note = 2'-fluorocytidine
  modified_base 7: mod_base = OTHER; note = 2'-O-methyladenosine
  modified_base 8: mod_base = um
  modified_base 9: mod_base = um
  modified_base 10: mod_base = gm
  modified_base 11: mod_base = um
  modified_base 12: mod_base = cm
  modified_base 13: mod_base = OTHER; note = 2'-O-methyladenosine
  modified_base 14: mod_base = OTHER; note = 2'-fluorouridine
  modified_base 15: mod_base = um
  modified_base 16: mod_base = OTHER; note = 2'-fluorocytidine
  modified_base 17: mod_base = um
  modified_base 18: mod_base = um
  modified_base 19: mod_base = gm
  modified_base 20: mod_base = OTHER; note = 2'-O-methyladenosine
  modified_base 21: mod_base = OTHER; note = 2'-O-methyluridine with a 3'-phosphorothioate linkage
  modified_base 22: mod_base = OTHER; note = 2'-O-methylcytidine with a 3'-phosphorothioate linkage
  modified_base 23: mod_base = um
ttggacattgtcattcttgatct

SEQ ID NO: 349 - RNA, 21 nt, synthetic construct
  source 1..21: mol_type = other RNA
  modified_base 1: mod_base = OTHER; note = 2'-O-methyluridine with a 3'-phosphorothioate linkage
  modified_base 2: mod_base = OTHER; note = 2'-O-methylguanosine with a 3'-phosphorothioate linkage
  modified_base 3: mod_base = um
  modified_base 4: mod_base = um
  modified_base 5: mod_base = gm
  modified_base 6: mod_base = OTHER; note = 2'-O-methyladenosine
  modified_base 7: mod_base = OTHER; note = 2'-fluorocytidine
  modified_base 8: mod_base = um
  modified_base 9: mod_base = OTHER; note = 2'-fluorouridine
  modified_base 10: mod_base = OTHER; note = 2'-fluoroguanosine
  modified_base 11: mod_base = OTHER; note = 2'-fluoroadenosine
  modified_base 12: mod_base = gm
  modified_base 13: mod_base = um
  modified_base 14: mod_base = OTHER; note = 2'-O-methyladenosine
  modified_base 15: mod_base = OTHER; note = 2'-O-methyladenosine
  modified_base 16: mod_base = OTHER; note = 2'-O-methyladenosine
  modified_base 17: mod_base = um
  modified_base 18: mod_base = OTHER; note = 2'-O-methyladenosine
  modified_base 19: mod_base = OTHER; note = 2'-O-methyluridine with a 3'-phosphorothioate linkage
  modified_base 20: mod_base = OTHER; note = 2'-O-methyladenosine with a 3'-phosphorothioate linkage
  modified_base 21: mod_base = OTHER; note = 2'-O-methyladenosine with a 3'-phosphate substitution
tgttgacttgagtaaatataa

SEQ ID NO: 350 - RNA, 23 nt, synthetic construct
  source 1..23: mol_type = other RNA
  modified_base 1: mod_base = OTHER; note = 2'-O-methyluridine with a 3'-phosphorothioate linkage and a 5'-phosphate substitution
  modified_base 2: mod_base = OTHER; note = 2'-fluorouridine with a 3'-phosphorothioate linkage
  modified_base 3: mod_base = OTHER; note = 2'-O-methyladenosine
  modified_base 4: mod_base = um
  modified_base 5: mod_base = OTHER; note = 2'-O-methyladenosine
  modified_base 6: mod_base = OTHER; note = 2'-fluorouridine
  modified_base 7: mod_base = um
  modified_base 8: mod_base = um
  modified_base 9: mod_base = OTHER; note = 2'-O-methyladenosine
  modified_base 10: mod_base = cm
  modified_base 11: mod_base = um
  modified_base 12: mod_base = cm
  modified_base 13: mod_base = OTHER; note = 2'-O-methyladenosine
  modified_base 14: mod_base = OTHER; note = 2'-fluoroadenosine
  modified_base 15: mod_base = gm
  modified_base 16: mod_base = OTHER; note = 2'-fluorouridine
  modified_base 17: mod_base = cm
  modified_base 18: mod_base = OTHER; note = 2'-O-methyladenosine
  modified_base 19: mod_base = OTHER; note = 2'-O-methyladenosine
  modified_base 20: mod_base = cm
  modified_base 21: mod_base = OTHER; note = 2'-O-methyladenosine with a 3'-phosphorothioate linkage
  modified_base 22: mod_base = OTHER; note = 2'-O-methyluridine with a 3'-phosphorothioate linkage
  modified_base 23: mod_base = cm
ttatatttactcaagtcaacatc

SEQ ID NO: 351 - RNA, 21 nt, synthetic construct
  source 1..21: mol_type = other RNA
  modified_base 1: mod_base = OTHER; note = 2'-O-methylguanosine with a 3'-phosphorothioate linkage
  modified_base 2: mod_base = OTHER; note = 2'-O-methylcytidine with a 3'-phosphorothioate linkage
  modified_base 3: mod_base = cm
  modified_base 4: mod_base = OTHER; note = 2'-O-methyladenosine
  modified_base 5: mod_base = OTHER; note = 2'-O-methyladenosine
  modified_base 6: mod_base = OTHER; note = 2'-O-methyladenosine
  modified_base 7: mod_base = OTHER; note = 2'-fluoroadenosine
  modified_base 8: mod_base = um
  modified_base 9: mod_base = OTHER; note = 2'-fluoroadenosine
  modified_base 10: mod_base = OTHER; note = 2'-fluoroguanosine
  modified_base 11: mod_base = OTHER; note = 2'-fluoroadenosine
  modified_base 12: mod_base = um
  modified_base 13: mod_base = gm
  modified_base 14: mod_base = OTHER; note = 2'-O-methyladenosine
  modified_base 15: mod_base = gm
  modified_base 16: mod_base = OTHER; note = 2'-O-methyladenosine
  modified_base 17: mod_base = um
  modified_base 18: mod_base = cm
  modified_base 19: mod_base = OTHER; note = 2'-O-methyladenosine with a 3'-phosphorothioate linkage
  modified_base 20: mod_base = OTHER; note = 2'-O-methyladenosine with a 3'-phosphorothioate linkage
  modified_base 21: mod_base = OTHER; note = 2'-O-methyladenosine with a 3'-phosphate substitution
gccaaaatagatgagatcaaa

SEQ ID NO: 352 - RNA, 23 nt, synthetic construct
  source 1..23: mol_type = other RNA
  modified_base 1: mod_base = OTHER; note = 2'-O-methyluridine with a 3'-phosphorothioate linkage and a 5'-phosphate substitution
  modified_base 2: mod_base = OTHER; note = 2'-fluorouridine with a 3'-phosphorothioate linkage
  modified_base 3: mod_base = um
  modified_base 4: mod_base = gm
  modified_base 5: mod_base = OTHER; note = 2'-O-methyladenosine
  modified_base 6: mod_base = OTHER; note = 2'-fluorouridine
  modified_base 7: mod_base = cm
  modified_base 8: mod_base = um
  modified_base 9: mod_base = cm
  modified_base 10: mod_base = OTHER; note = 2'-O-methyladenosine
  modified_base 11: mod_base = um
  modified_base 12: mod_base = cm
  modified_base 13: mod_base = um
  modified_base 14: mod_base = OTHER; note = 2'-fluoroadenosine
  modified_base 15: mod_base = um
  modified_base 16: mod_base = OTHER; note = 2'-fluorouridine
  modified_base 17: mod_base = um
  modified_base 18: mod_base = um
  modified_base 19: mod_base = gm
  modified_base 20: mod_base = gm
  modified_base 21: mod_base = OTHER; note = 2'-O-methylcytidine with a 3'-phosphorothioate linkage
  modified_base 22: mod_base = OTHER; note = 2'-O-methyluridine with a 3'-phosphorothioate linkage
  modified_base 23: mod_base = um
tttgatctcatctattttggctt

SEQ ID NO: 353 - RNA, 21 nt, synthetic construct
  source 1..21: mol_type = other RNA
  modified_base 1: mod_base = OTHER; note = 2'-O-methyladenosine with a 3'-phosphorothioate linkage
  modified_base 2: mod_base = OTHER; note = 2'-O-methyladenosine with a 3'-phosphorothioate linkage
  modified_base 3: mod_base = um
  modified_base 4: mod_base = gm
  modified_base 5: mod_base = cm
  modified_base 6: mod_base = OTHER; note = 2'-O-methyladenosine
  modified_base 7: mod_base = OTHER; note = 2'-fluoroguanosine
  modified_base 8: mod_base = OTHER; note = 2'-O-methyladenosine
  modified_base 9: mod_base = OTHER; note = 2'-fluoroadenosine
  modified_base 10: mod_base = OTHER; note = 2'-fluoroguanosine
  modified_base 11: mod_base = OTHER; note = 2'-fluoroadenosine
  modified_base 12: mod_base = um
  modified_base 13: mod_base = gm
  modified_base 14: mod_base = um
  modified_base 15: mod_base = OTHER; note = 2'-O-methyladenosine
  modified_base 16: mod_base = gm
  modified_base 17: mod_base = OTHER; note = 2'-O-methyladenosine
  modified_base 18: mod_base = um
  modified_base 19: mod_base = OTHER; note = 2'-O-methyluridine with a 3'-phosphorothioate linkage
  modified_base 20: mod_base = OTHER; note = 2'-O-methylguanosine with a 3'-phosphorothioate linkage
  modified_base 21: mod_base = OTHER; note = 2'-O-methyladenosine with a 3'-phosphate substitution
aatgcagaagatgtagattga

SEQ ID NO: 354 - RNA, 23 nt, synthetic construct
  source 1..23: mol_type = other RNA
  modified_base 1: mod_base = OTHER; note = 2'-O-methyluridine with a 3'-phosphorothioate linkage and a 5'-phosphate substitution
  modified_base 2: mod_base = OTHER; note = 2'-fluorocytidine with a 3'-phosphorothioate linkage
  modified_base 3: mod_base = OTHER; note = 2'-O-methyladenosine
  modified_base 4: mod_base = OTHER; note = 2'-O-methyladenosine
  modified_base 5: mod_base = um
  modified_base 6: mod_base = OTHER; note = 2'-fluorocytidine
  modified_base 7: mod_base = um
  modified_base 8: mod_base = OTHER; note = 2'-O-methyladenosine
  modified_base 9: mod_base = cm
  modified_base 10: mod_base = OTHER; note = 2'-O-methyladenosine
  modified_base 11: mod_base = um
  modified_base 12: mod_base = cm
  modified_base 13: mod_base = um
  modified_base 14: mod_base = OTHER; note = 2'-fluorouridine
  modified_base 15: mod_base = cm
  modified_base 16: mod_base = OTHER; note = 2'-fluorouridine
  modified_base 17: mod_base = gm
  modified_base 18: mod_base = cm
  modified_base 19: mod_base = OTHER; note = 2'-O-methyladenosine
  modified_base 20: mod_base = um
  modified_base 21: mod_base = OTHER; note = 2'-O-methyluridine with a 3'-phosphorothioate linkage
  modified_base 22: mod_base = OTHER; note = 2'-O-methyluridine with a 3'-phosphorothioate linkage
  modified_base 23: mod_base = gm
tcaatctacatcttctgcatttg

SEQ ID NO: 355 - RNA, 21 nt, synthetic construct
  source 1..21: mol_type = other RNA
  modified_base 1: mod_base = OTHER; note = 2'-O-methylguanosine with a 3'-phosphorothioate linkage
  modified_base 2: mod_base = OTHER; note = 2'-O-methylcytidine with a 3'-phosphorothioate linkage
  modified_base 3: mod_base = um
  modified_base 4: mod_base = um
  modified_base 5: mod_base = um
  modified_base 6: mod_base = gm
  modified_base 7: mod_base = OTHER; note = 2'-fluorouridine
  modified_base 8: mod_base = um
  modified_base 9: mod_base = OTHER; note = 2'-fluorocytidine
  modified_base 10: mod_base = OTHER; note = 2'-fluoroguanosine
  modified_base 11: mod_base = OTHER; note = 2'-fluoroadenosine
  modified_base 12: mod_base = OTHER; note = 2'-O-methyladenosine
  modified_base 13: mod_base = OTHER; note = 2'-O-methyladenosine
  modified_base 14: mod_base = gm
  modified_base 15: mod_base = OTHER; note = 2'-O-methyladenosine
  modified_base 16: mod_base = OTHER; note = 2'-O-methyladenosine
  modified_base 17: mod_base = um
  modified_base 18: mod_base = gm
  modified_base 19: mod_base = OTHER; note = 2'-O-methylguanosine with a 3'-phosphorothioate linkage
  modified_base 20: mod_base = OTHER; note = 2'-O-methyluridine with a 3'-phosphorothioate linkage
  modified_base 21: mod_base = OTHER; note = 2'-O-methyladenosine with a 3'-phosphate substitution
gctttgttcgaaagaatggta

SEQ ID NO: 356 - RNA, 23 nt, synthetic construct
  source 1..23: mol_type = other RNA
  modified_base 1: mod_base = OTHER; note = 2'-O-methyluridine with a 3'-phosphorothioate linkage and a 5'-phosphate substitution
  modified_base 2: mod_base = OTHER; note = 2'-fluoroadenosine with a 3'-phosphorothioate linkage
  modified_base 3: mod_base = cm
  modified_base 4: mod_base = cm
  modified_base 5: mod_base = OTHER; note = 2'-O-methyladenosine
  modified_base 6: mod_base = OTHER; note = 2'-fluorouridine
  modified_base 7: mod_base = um
  modified_base 8: mod_base = cm
  modified_base 9: mod_base = um
  modified_base 10: mod_base = um
  modified_base 11: mod_base = um
  modified_base 12: mod_base = cm
  modified_base 13: mod_base = gm
  modified_base 14: mod_base = OTHER; note = 2'-fluoroadenosine
  modified_base 15: mod_base = OTHER; note = 2'-O-methyladenosine
  modified_base 16: mod_base = OTHER; note = 2'-fluorocytidine
  modified_base 17: mod_base = OTHER; note = 2'-O-methyladenosine
  modified_base 18: mod_base = OTHER; note = 2'-O-methyladenosine
  modified_base 19: mod_base = OTHER; note = 2'-O-methyladenosine
  modified_base 20: mod_base = gm
  modified_base 21: mod_base = OTHER; note = 2'-O-methylcytidine with a 3'-phosphorothioate linkage
  modified_base 22: mod_base = OTHER; note = 2'-O-methylcytidine with a 3'-phosphorothioate linkage
  modified_base 23: mod_base = um
taccattctttcgaacaaagcct

SEQ ID NO: 357 - RNA, 21 nt, synthetic construct
  source 1..21: mol_type = other RNA
  modified_base 1: mod_base = OTHER; note = 2'-O-methylguanosine with a 3'-phosphorothioate linkage
  modified_base 2: mod_base = OTHER; note = 2'-O-methyladenosine with a 3'-phosphorothioate linkage
  modified_base 3: mod_base = cm
  modified_base 4: mod_base = um
  modified_base 5: mod_base = um
  modified_base 6: mod_base = gm
  modified_base 7: mod_base = OTHER; note = 2'-fluoroadenosine
  modified_base 8: mod_base = gm
  modified_base 9: mod_base = OTHER; note = 2'-fluorouridine
  modified_base 10: mod_base = OTHER; note = 2'-fluoroadenosine
  modified_base 11: mod_base = OTHER; note = 2'-fluoroadenosine
  modified_base 12: mod_base = OTHER; note = 2'-O-methyladenosine
  modified_base 13: mod_base = um
  modified_base 14: mod_base = OTHER; note = 2'-O-methyladenosine
  modified_base 15: mod_base = um
  modified_base 16: mod_base = OTHER; note = 2'-O-methyladenosine
  modified_base 17: mod_base = um
  modified_base 18: mod_base = cm
  modified_base 19: mod_base = OTHER; note = 2'-O-methyladenosine with a 3'-phosphorothioate linkage
  modified_base 20: mod_base = OTHER; note = 2'-O-methylcytidine with a 3'-phosphorothioate linkage
  modified_base 21: mod_base = OTHER; note = 2'-O-methyladenosine with a 3'-phosphate substitution
gacttgagtaaatatatcaca

SEQ ID NO: 358 - RNA, 23 nt, synthetic construct
  source 1..23: mol_type = other RNA
  modified_base 1: mod_base = OTHER; note = 2'-O-methyluridine with a 3'-phosphorothioate linkage and a 5'-phosphate substitution
  modified_base 2: mod_base = OTHER; note = 2'-fluoroguanosine with a 3'-phosphorothioate linkage
  modified_base 3: mod_base = um
  modified_base 4: mod_base = gm
  modified_base 5: mod_base = OTHER; note = 2'-O-methyladenosine
  modified_base 6: mod_base = OTHER; note = 2'-fluorouridine
  modified_base 7: mod_base = OTHER; note = 2'-O-methyladenosine
  modified_base 8: mod_base = um
  modified_base 9: mod_base = OTHER; note = 2'-O-methyladenosine
  modified_base 10: mod_base = um
  modified_base 11: mod_base = um
  modified_base 12: mod_base = um
  modified_base 13: mod_base = OTHER; note = 2'-O-methyladenosine
  modified_base 14: mod_base = OTHER; note = 2'-fluorocytidine
  modified_base 15: mod_base = um
  modified_base 16: mod_base = OTHER; note = 2'-fluorocytidine
  modified_base 17: mod_base = OTHER; note = 2'-O-methyladenosine
  modified_base 18: mod_base = OTHER; note = 2'-O-methyladenosine
  modified_base 19: mod_base = gm
  modified_base 20: mod_base = um
  modified_base 21: mod_base = OTHER; note = 2'-O-methylcytidine with a 3'-phosphorothioate linkage
  modified_base 22: mod_base = OTHER; note = 2'-O-methyladenosine with a 3'-phosphorothioate linkage
  modified_base 23: mod_base = OTHER; note = 2'-O-methyladenosine
tgtgatatatttactcaagtcaa

SEQ ID NO: 359 - RNA, 21 nt, synthetic construct
  source 1..21: mol_type = other RNA
  modified_base 1: mod_base = OTHER; note = 2'-O-methyladenosine with a 3'-phosphorothioate linkage
  modified_base 2: mod_base = OTHER; note = 2'-O-methylguanosine with a 3'-phosphorothioate linkage
  modified_base 3: mod_base = OTHER; note = 2'-O-methyladenosine
  modified_base 4: mod_base = um
  modified_base 5: mod_base = gm
  modified_base 6: mod_base = OTHER; note = 2'-O-methyladenosine
  modified_base 7: mod_base = OTHER; note = 2'-fluoroguanosine
  modified_base 8: mod_base = OTHER; note = 2'-O-methyladenosine
  modified_base 9: mod_base = OTHER; note = 2'-fluorouridine
  modified_base 10: mod_base = OTHER; note = 2'-fluorocytidine
  modified_base 11: mod_base = OTHER; note = 2'-fluoroadenosine
  modified_base 12: mod_base = OTHER; note = 2'-O-methyladenosine
  modified_base 13: mod_base = gm
  modified_base 14: mod_base = OTHER; note = 2'-O-methyladenosine
  modified_base 15: mod_base = OTHER; note = 2'-O-methyladenosine
  modified_base 16: mod_base = um
  modified_base 17: mod_base = gm
  modified_base 18: mod_base = OTHER; note = 2'-O-methyladenosine
  modified_base 19: mod_base = OTHER; note = 2'-O-methylcytidine with a 3'-phosphorothioate linkage
  modified_base 20: mod_base = OTHER; note = 2'-O-methyladenosine with a 3'-phosphorothioate linkage
  modified_base 21: mod_base = OTHER; note = 2'-O-methyladenosine with a 3'-phosphate substitution
agatgagatcaagaatgacaa

SEQ ID NO: 360 - RNA, 23 nt, synthetic construct
  source 1..23: mol_type = other RNA
  modified_base 1: mod_base = OTHER; note = 2'-O-methyluridine with a 3'-phosphorothioate linkage and a 5'-phosphate substitution
  modified_base 2: mod_base = OTHER; note = 2'-fluorouridine with a 3'-phosphorothioate linkage
  modified_base 3: mod_base = gm
  modified_base 4: mod_base = um
  modified_base 5: mod_base = cm
  modified_base 6: mod_base = OTHER; note = 2'-fluoroadenosine
  modified_base 7: mod_base = um
  modified_base 8: mod_base = um
  modified_base 9: mod_base = cm
  modified_base 10: mod_base = um
  modified_base 11: mod_base = um
  modified_base 12: mod_base = gm
  modified_base 13: mod_base = OTHER; note = 2'-O-methyladenosine
  modified_base 14: mod_base = OTHER; note = 2'-fluorouridine
  modified_base 15: mod_base = cm
  modified_base 16: mod_base = OTHER; note = 2'-fluorouridine
  modified_base 17: mod_base = cm
  modified_base 18: mod_base = OTHER; note = 2'-O-methyladenosine
  modified_base 19: mod_base = um
  modified_base 20: mod_base = cm
  modified_base 21: mod_base = OTHER; note = 2'-O-methyluridine with a 3'-phosphorothioate linkage
  modified_base 22: mod_base = OTHER; note = 2'-O-methyladenosine with a 3'-phosphorothioate linkage
  modified_base 23: mod_base = um
ttgtcattcttgatctcatctat

SEQ ID NO: 361 - RNA, 21 nt, synthetic construct
  source 1..21: mol_type = other RNA
  modified_base 1: mod_base = OTHER; note = 2'-O-methyluridine with a 3'-phosphorothioate linkage
  modified_base 2: mod_base = OTHER; note = 2'-O-methyluridine with a 3'-phosphorothioate linkage
  modified_base 3: mod_base = gm
  modified_base 4: mod_base = OTHER; note = 2'-O-methyladenosine
  modified_base 5: mod_base = gm
  modified_base 6: mod_base = um
  modified_base 7: mod_base = OTHER; note = 2'-fluoroadenosine
  modified_base 8: mod_base = OTHER; note = 2'-O-methyladenosine
  modified_base 9: mod_base = OTHER; note = 2'-fluoroadenosine
  modified_base 10: mod_base = OTHER; note = 2'-fluorouridine
  modified_base 11: mod_base = OTHER; note = 2'-fluoroadenosine
  modified_base 12: mod_base = um
  modified_base 13: mod_base = OTHER; note = 2'-O-methyladenosine
  modified_base 14: mod_base = um
  modified_base 15: mod_base = cm
  modified_base 16: mod_base = OTHER; note = 2'-O-methyladenosine
  modified_base 17: mod_base = cm
  modified_base 18: mod_base = cm
  modified_base 19: mod_base = OTHER; note = 2'-O-methyladenosine with a 3'-phosphorothioate linkage
  modified_base 20: mod_base = OTHER; note = 2'-O-methylcytidine with a 3'-phosphorothioate linkage
  modified_base 21: mod_base = OTHER; note = 2'-O-methyladenosine with a 3'-phosphate substitution
ttgagtaaatatatcaccaca

SEQ ID NO: 362 - RNA, 23 nt, synthetic construct
  source 1..23: mol_type = other RNA
  modified_base 1: mod_base = OTHER; note = 2'-O-methyluridine with a 3'-phosphorothioate linkage and a 5'-phosphate substitution
  modified_base 2: mod_base = OTHER; note = 2'-fluoroguanosine with a 3'-phosphorothioate linkage
  modified_base 3: mod_base = um
  modified_base 4: mod_base = gm
  modified_base 5: mod_base = gm
  modified_base 6: mod_base = OTHER; note = 2'-fluorouridine
  modified_base 7: mod_base = gm
  modified_base 8: mod_base = OTHER; note = 2'-O-methyladenosine
  modified_base 9: mod_base = um
  modified_base 10: mod_base = OTHER; note = 2'-O-methyladenosine
  modified_base 11: mod_base = um
  modified_base 12: mod_base = OTHER; note = 2'-O-methyladenosine
  modified_base 13: mod_base = um
  modified_base 14: mod_base = OTHER; note = 2'-fluorouridine
  modified_base 15: mod_base = um
  modified_base 16: mod_base = OTHER; note = 2'-fluoroadenosine
  modified_base 17: mod_base = cm
  modified_base 18: mod_base = um
  modified_base 19: mod_base = cm
  modified_base 20: mod_base = OTHER; note = 2'-O-methyladenosine
  modified_base 21: mod_base = OTHER; note = 2'-O-methyladenosine with a 3'-phosphorothioate linkage
  modified_base 22: mod_base = OTHER; note = 2'-O-methylguanosine with a 3'-phosphorothioate linkage
  modified_base 23: mod_base = um
tgtggtgatatatttactcaagt

SEQ ID NO: 363 - RNA, 21 nt, synthetic construct
  source 1..21: mol_type = other RNA
  modified_base 1: mod_base = OTHER; note = 2'-O-methyladenosine with a 3'-phosphorothioate linkage
  modified_base 2: mod_base = OTHER; note = 2'-O-methyladenosine with a 3'-phosphorothioate linkage
  modified_base 3: mod_base = um
  modified_base 4: mod_base = OTHER; note = 2'-O-methyladenosine
  modified_base 5: mod_base = gm
  modified_base 6: mod_base = OTHER; note = 2'-O-methyladenosine
  modified_base 7: mod_base = OTHER; note = 2'-fluorouridine
  modified_base 8: mod_base = gm
  modified_base 9: mod_base = OTHER; note = 2'-fluoroadenosine
  modified_base 10: mod_base = OTHER; note = 2'-fluoroguanosine
  modified_base 11: mod_base = OTHER; note = 2'-fluoroadenosine
  modified_base 12: mod_base = um
  modified_base 13: mod_base = cm
  modified_base 14: mod_base = OTHER; note = 2'-O-methyladenosine
  modified_base 15: mod_base = OTHER; note = 2'-O-methyladenosine
  modified_base 16: mod_base = gm
  modified_base 17: mod_base = OTHER; note = 2'-O-methyladenosine
  modified_base 18: mod_base = OTHER; note = 2'-O-methyladenosine
  modified_base 19: mod_base = OTHER; note = 2'-O-methyluridine with a 3'-phosphorothioate linkage
  modified_base 20: mod_base = OTHER; note = 2'-O-methylguanosine with a 3'-phosphorothioate linkage
  modified_base 21: mod_base = OTHER; note = 2'-O-methyladenosine with a 3'-phosphate substitution
aatagatgagatcaagaatga

SEQ ID NO: 364 - RNA, 23 nt, synthetic construct
  source 1..23: mol_type = other RNA
  modified_base 1: mod_base = OTHER; note = 2'-O-methyluridine with a 3'-phosphorothioate linkage and a 5'-phosphate substitution
  modified_base 2: mod_base = OTHER; note = 2'-fluorocytidine with a 3'-phosphorothioate linkage
  modified_base 3: mod_base = OTHER; note = 2'-O-methyladenosine
  modified_base 4: mod_base = um
  modified_base 5: mod_base = um
  modified_base 6: mod_base = OTHER; note = 2'-fluorocytidine
  modified_base 7: mod_base = um
  modified_base 8: mod_base = um
  modified_base 9: mod_base = gm
  modified_base 10: mod_base = OTHER; note = 2'-O-methyladenosine
  modified_base 11: mod_base = um
  modified_base 12: mod_base = cm
  modified_base 13: mod_base = um
  modified_base 14: mod_base = OTHER; note = 2'-fluorocytidine
  modified_base 15: mod_base = OTHER; note = 2'-O-methyladenosine
  modified_base 16: mod_base = OTHER; note = 2'-fluorouridine
  modified_base 17: mod_base = cm
  modified_base 18: mod_base = um
  modified_base 19: mod_base = OTHER; note = 2'-O-methyladenosine
  modified_base 20: mod_base = um
  modified_base 21: mod_base = OTHER; note = 2'-O-methyluridine with a 3'-phosphorothioate linkage
  modified_base 22: mod_base = OTHER; note = 2'-O-methyluridine with a 3'-phosphorothioate linkage
  modified_base 23: mod_base = um
tcattcttgatctcatctatttt

SEQ ID NO: 365 - RNA, 21 nt, synthetic construct
  source 1..21: mol_type = other RNA
  modified_base 1: mod_base = OTHER; note = 2'-O-methylcytidine with a 3'-phosphorothioate linkage
  modified_base 2: mod_base = OTHER; note = 2'-O-methyluridine with a 3'-phosphorothioate linkage
  modified_base 3: mod_base = um
  modified_base 4: mod_base = um
  modified_base 5: mod_base = gm
  modified_base 6: mod_base = um
  modified_base 7: mod_base = OTHER; note = 2'-fluorouridine
  modified_base 8: mod_base = cm
  modified_base 9: mod_base = OTHER; note = 2'-fluoroguanosine
  modified_base 10: mod_base = OTHER; note = 2'-fluoroadenosine
  modified_base 11: mod_base = OTHER; note = 2'-fluoroadenosine
  modified_base 12: mod_base = OTHER; note = 2'-O-methyladenosine
  modified_base 13: mod_base = gm
  modified_base 14: mod_base = OTHER; note = 2'-O-methyladenosine
  modified_base 15: mod_base = OTHER; note = 2'-O-methyladenosine
  modified_base 16: mod_base = um
  modified_base 17: mod_base = gm
  modified_base 18: mod_base = gm
  modified_base 19: mod_base = OTHER; note = 2'-O-methyluridine with a 3'-phosphorothioate linkage
  modified_base 20: mod_base = OTHER; note = 2'-O-methylguanosine with a 3'-phosphorothioate linkage
  modified_base 21: mod_base = OTHER; note = 2'-O-methyladenosine with a 3'-phosphate substitution
ctttgttcgaaagaatggtga

SEQ ID NO: 366 - RNA, 23 nt, synthetic construct
  source 1..23: mol_type = other RNA
  modified_base 1: mod_base = OTHER; note = 2'-O-methyluridine with a 3'-phosphorothioate linkage and a 5'-phosphate substitution
  modified_base 2: mod_base = OTHER; note = 2'-fluorocytidine with a 3'-phosphorothioate linkage
  modified_base 3: mod_base = OTHER; note = 2'-O-methyladenosine
  modified_base 4: mod_base = cm
  modified_base 5: mod_base = cm
  modified_base 6: mod_base = OTHER; note = 2'-fluoroadenosine
  modified_base 7: mod_base = um
  modified_base 8: mod_base = um
  modified_base 9: mod_base = cm
  modified_base 10: mod_base = um
  modified_base 11: mod_base = um
  modified_base 12: mod_base = um
  modified_base 13: mod_base = cm
  modified_base 14: mod_base = OTHER; note = 2'-fluoroguanosine
  modified_base 15: mod_base = OTHER; note = 2'-O-methyladenosine
  modified_base 16: mod_base = OTHER; note = 2'-fluoroadenosine
  modified_base 17: mod_base = cm
  modified_base 18: mod_base = OTHER; note = 2'-O-methyladenosine
  modified_base 19: mod_base = OTHER; note = 2'-O-methyladenosine
  modified_base 20: mod_base = OTHER; note = 2'-O-methyladenosine
  modified_base 21: mod_base = OTHER; note = 2'-O-methylguanosine with a 3'-phosphorothioate linkage
  modified_base 22: mod_base = OTHER; note = 2'-O-methylcytidine with a 3'-phosphorothioate linkage
  modified_base 23: mod_base = cm
tcaccattctttcgaacaaagcc

SEQ ID NO: 367 - RNA, 21 nt, synthetic construct
  source 1..21: mol_type = other RNA
  modified_base 1: mod_base = OTHER; note = 2'-O-methyluridine with a 3'-phosphorothioate linkage
  modified_base 2: mod_base = OTHER; note = 2'-O-methylguanosine with a 3'-phosphorothioate linkage
  modified_base 3: mod_base = um
  modified_base 4: mod_base = gm
  modified_base 5: mod_base = OTHER; note = 2'-O-methyladenosine
  modified_base 6: mod_base = um
  modified_base 7: mod_base = OTHER; note = 2'-fluoroguanosine
  modified_base 8: mod_base = OTHER; note = 2'-O-methyladenosine
  modified_base 9: mod_base = OTHER; note = 2'-fluoroadenosine
  modified_base 10: mod_base = OTHER; note = 2'-fluoroguanosine
  modified_base 11: mod_base = OTHER; note = 2'-fluoroguanosine
  modified_base 12: mod_base = OTHER; note = 2'-O-methyladenosine
  modified_base 13: mod_base = cm
  modified_base 14: mod_base = OTHER; note = 2'-O-methyladenosine
  modified_base 15: mod_base = um
  modified_base 16: mod_base = gm
  modified_base 17: mod_base = gm
  modified_base 18: mod_base = cm
  modified_base 19: mod_base = OTHER; note = 2'-O-methyluridine with a 3'-phosphorothioate linkage
  modified_base 20: mod_base = OTHER; note = 2'-O-methyluridine with a 3'-phosphorothioate linkage
  modified_base 21: mod_base = OTHER; note = 2'-O-methyladenosine with a 3'-phosphate substitution
tgtgatgaaggacatggctta

SEQ ID NO: 368 - RNA, 23 nt, synthetic construct
  source 1..23: mol_type = other RNA
  modified_base 1: mod_base = OTHER; note = 2'-O-methyluridine with a 3'-phosphorothioate linkage and a 5'-phosphate substitution
  modified_base 2: mod_base = OTHER; note = 2'-fluoroadenosine with a 3'-phosphorothioate linkage
  modified_base 3: mod_base = OTHER; note = 2'-O-methyladenosine
  modified_base 4: mod_base = gm
  modified_base 5: mod_base = cm
  modified_base 6: mod_base = OTHER; note = 2'-fluorocytidine
  modified_base 7: mod_base = OTHER; note = 2'-O-methyladenosine
  modified_base 8: mod_base = um
  modified_base 9: mod_base = gm
  modified_base 10: mod_base = um
  modified_base 11: mod_base = cm
  modified_base 12: mod_base = cm
  modified_base 13: mod_base = um
  modified_base 14: mod_base = OTHER; note = 2'-fluorouridine
  modified_base 15: mod_base = cm
  modified_base 16: mod_base = OTHER; note = 2'-fluoroadenosine
  modified_base 17: mod_base = um
  modified_base 18: mod_base = cm
  modified_base 19: mod_base = OTHER; note = 2'-O-methyladenosine
  modified_base 20: mod_base = cm
  modified_base 21: mod_base = OTHER; note = 2'-O-methyladenosine with a 3'-phosphorothioate linkage
  modified_base 22: mod_base = OTHER; note = 2'-O-methylcytidine with a 3'-phosphorothioate linkage
  modified_base 23: mod_base = OTHER; note = 2'-O-methyladenosine
taagccatgtccttcatcacaca

SEQ ID NO: 369 - RNA, 21 nt, synthetic construct
  source 1..21: mol_type = other RNA
  modified_base 1: mod_base = OTHER; note = 2'-O-methyluridine with a 3'-phosphorothioate linkage
  modified_base 2: mod_base = OTHER; note = 2'-O-methylguanosine with a 3'-phosphorothioate linkage
  modified_base 3: mod_base = OTHER; note = 2'-O-methyladenosine
  modified_base 4: mod_base = cm
  modified_base 5: mod_base = um
  modified_base 6: mod_base = um
  modified_base 7: mod_base = OTHER; note = 2'-fluoroguanosine
  modified_base 8: mod_base = OTHER; note = 2'-O-methyladenosine
  modified_base 9: mod_base = OTHER; note = 2'-fluoroguanosine
  modified_base 10: mod_base = OTHER; note = 2'-fluorouridine
  modified_base 11: mod_base = OTHER; note = 2'-fluoroadenosine
  modified_base 12: mod_base = OTHER; note = 2'-O-methyladenosine
  modified_base 13: mod_base = OTHER; note = 2'-O-methyladenosine
  modified_base 14: mod_base = um
  modified_base 15: mod_base = OTHER; note = 2'-O-methyladenosine
  modified_base 16: mod_base = um
  modified_base 17: mod_base = OTHER; note = 2'-O-methyladenosine
  modified_base 18: mod_base = um
  modified_base 19: mod_base = OTHER; note = 2'-O-methylcytidine with a 3'-phosphorothioate linkage
  modified_base 20: mod_base = OTHER; note = 2'-O-methyladenosine with a 3'-phosphorothioate linkage
  modified_base 21: mod_base = OTHER; note = 2'-O-methyladenosine with a 3'-phosphate substitution
tgacttgagtaaatatatcaa

SEQ ID NO: 370 - RNA, 23 nt, synthetic construct
  source 1..23: mol_type = other RNA
  modified_base 1: mod_base = OTHER; note = 2'-O-methyluridine with a 3'-phosphorothioate linkage and a 5'-phosphate substitution
  modified_base 2: mod_base = OTHER; note = 2'-fluorouridine with a 3'-phosphorothioate linkage
  modified_base 3: mod_base = gm
  modified_base 4: mod_base = OTHER; note = 2'-O-methyladenosine
  modified_base 5: mod_base = um
  modified_base 6: mod_base = OTHER; note = 2'-fluoroadenosine
  modified_base 7: mod_base = um
  modified_base 8: mod_base = OTHER; note = 2'-O-methyladenosine
  modified_base 9: mod_base = um
  modified_base 10: mod_base = um
  modified_base 11: mod_base = um
  modified_base 12: mod_base = OTHER; note = 2'-O-methyladenosine
  modified_base 13: mod_base = cm
  modified_base 14: mod_base = OTHER; note = 2'-fluorouridine
  modified_base 15: mod_base = cm
  modified_base 16: mod_base = OTHER; note = 2'-fluoroadenosine
  modified_base 17: mod_base = OTHER; note = 2'-O-methyladenosine
  modified_base 18: mod_base = gm
  modified_base 19: mod_base = um
  modified_base 20: mod_base = cm
  modified_base 21: mod_base = OTHER; note = 2'-O-methyladenosine with a 3'-phosphorothioate linkage
  modified_base 22: mod_base = OTHER; note = 2'-O-methyladenosine with a 3'-phosphorothioate linkage
  modified_base 23: mod_base = cm
ttgatatatttactcaagtcaac

SEQ ID NO: 371 - RNA, 21 nt, synthetic construct
  source 1..21: mol_type = other RNA
  modified_base 1: mod_base = OTHER; note = 2'-O-methylguanosine with a 3'-phosphorothioate linkage
  modified_base 2: mod_base = OTHER; note = 2'-O-methyladenosine with a 3'-phosphorothioate linkage
  modified_base 3: mod_base = OTHER; note = 2'-O-methyladenosine
  modified_base 4: mod_base = OTHER; note = 2'-O-methyladenosine
  modified_base 5: mod_base = gm
  modified_base 6: mod_base = um
  modified_base 7: mod_base = OTHER; note = 2'-fluorouridine
  modified_base 8: mod_base = cm
  modified_base 9: mod_base = OTHER; note = 2'-fluoroadenosine
  modified_base 10: mod_base = OTHER; note = 2'-fluoroadenosine
  modified_base 11: mod_base = OTHER; note = 2'-fluorocytidine
  modified_base 12: mod_base = um
  modified_base 13: mod_base = gm
  modified_base 14: mod_base = cm
  modified_base 15: mod_base = um
  modified_base 16: mod_base = um
  modified_base 17: mod_base = cm
  modified_base 18: mod_base = gm
  modified_base 19: mod_base = OTHER; note = 2'-O-methyluridine with a 3'-phosphorothioate linkage
  modified_base 20: mod_base = OTHER; note = 2'-O-methyladenosine with a 3'-phosphorothioate linkage
  modified_base 21: mod_base = OTHER; note = 2'-O-methyladenosine with a 3'-phosphate substitution
gaaagttcaactgcttcgtaa

SEQ ID NO: 372 - RNA, 23 nt, synthetic construct
  source 1..23: mol_type = other RNA
  modified_base 1: mod_base = OTHER; note = 2'-O-methyluridine with a 3'-phosphorothioate linkage and a 5'-phosphate substitution
  modified_base 2: mod_base = OTHER; note = 2'-fluorouridine with a 3'-phosphorothioate linkage
  modified_base 3: mod_base = OTHER; note = 2'-O-methyladenosine
  modified_base 4: mod_base = cm
  modified_base 5: mod_base = gm
  modified_base 6: mod_base = OTHER; note = 2'-fluoroadenosine
  modified_base 7: mod_base = OTHER; note = 2'-O-methyladenosine
  modified_base 8: mod_base = gm
  modified_base 9: mod_base = cm
  modified_base 10: mod_base = OTHER; note = 2'-O-methyladenosine
  modified_base 11: mod_base = gm
  modified_base 12: mod_base = um
  modified_base 13: mod_base = um
  modified_base 14: mod_base = OTHER; note = 2'-fluoroguanosine
  modified_base 15: mod_base = OTHER; note = 2'-O-methyladenosine
  modified_base 16: mod_base = OTHER; note = 2'-fluoroadenosine
  modified_base 17: mod_base = cm
  modified_base 18: mod_base = um
  modified_base 19: mod_base = um
  modified_base 20: mod_base = um
  modified_base 21: mod_base = OTHER; note = 2'-O-methylcytidine with a 3'-phosphorothioate linkage
  modified_base 22: mod_base = OTHER; note = 2'-O-methyluridine with a 3'-phosphorothioate linkage
  modified_base 23: mod_base = gm
ttacgaagcagttgaactttctg

SEQ ID NO: 373 - RNA, 21 nt, synthetic construct
  source 1..21: mol_type = other RNA
  modified_base 1: mod_base = OTHER; note = 2'-O-methylguanosine with a 3'-phosphorothioate linkage
  modified_base 2: mod_base = OTHER; note = 2'-O-methylcytidine with a 3'-phosphorothioate linkage
  modified_base 3: mod_base = OTHER; note = 2'-O-methyladenosine
  modified_base 4: mod_base = gm
  modified_base 5: mod_base = OTHER; note = 2'-O-methyladenosine
  modified_base 6: mod_base = OTHER; note = 2'-O-methyladenosine
  modified_base 7: mod_base = OTHER; note = 2'-fluoroguanosine
  modified_base 8: mod_base = OTHER; note = 2'-O-methyladenosine
  modified_base 9: mod_base = OTHER; note = 2'-fluorouridine
  modified_base 10: mod_base = OTHER; note = 2'-fluoroguanosine
  modified_base 11: mod_base = OTHER; note = 2'-fluorouridine
  modified_base 12: mod_base = OTHER; note = 2'-O-methyladenosine
  modified_base 13: mod_base = gm
  modified_base 14: mod_base = OTHER; note = 2'-O-methyladenosine
  modified_base 15: mod_base = um
  modified_base 16: mod_base = um
  modified_base 17: mod_base = gm
  modified_base 18: mod_base = um
  modified_base 19: mod_base = OTHER; note = 2'-O-methylguanosine with a 3'-phosphorothioate linkage
  modified_base 20: mod_base = OTHER; note = 2'-O-methyluridine with a 3'-phosphorothioate linkage
  modified_base 21: mod_base = OTHER; note = 2'-O-methyladenosine with a 3'-phosphate substitution
gcagaagatgtagattgtgta

SEQ ID NO: 374 - RNA, 23 nt, synthetic construct
  source 1..23: mol_type = other RNA
  modified_base 1: mod_base = OTHER; note = 2'-O-methyluridine with a 3'-phosphorothioate linkage and a 5'-phosphate substitution
  modified_base 2: mod_base = OTHER; note = 2'-fluoroadenosine with a 3'-phosphorothioate linkage
  modified_base 3: mod_base = cm
  modified_base 4: mod_base = OTHER; note = 2'-O-methyladenosine
  modified_base 5: mod_base = cm
  modified_base 6: mod_base = OTHER; note = 2'-fluoroadenosine
  modified_base 7: mod_base = OTHER; note = 2'-O-methyladenosine
  modified_base 8: mod_base = um
  modified_base 9: mod_base = cm
  modified_base 10: mod_base = um
  modified_base 11: mod_base = OTHER; note = 2'-O-methyladenosine
  modified_base 12: mod_base = cm
  modified_base 13: mod_base = OTHER; note = 2'-O-methyladenosine
  modified_base 14: mod_base = OTHER; note = 2'-fluorouridine
  modified_base 15: mod_base = cm
  modified_base 16: mod_base = OTHER; note = 2'-fluorouridine
  modified_base 17: mod_base = um
  modified_base 18: mod_base = cm
  modified_base 19: mod_base = um
  modified_base 20: mod_base = gm
  modified_base 21: mod_base = OTHER; note = 2'-O-methylcytidine with a 3'-phosphorothioate linkage
  modified_base 22: mod_base = OTHER; note = 2'-O-methyladenosine with a 3'-phosphorothioate linkage
  modified_base 23: mod_base = um
tacacaatctacatcttctgcat

SEQ ID NO: 375 - RNA, 21 nt, synthetic construct
  source 1..21: mol_type = other RNA
  modified_base 1: mod_base = OTHER; note = 2'-O-methyluridine with a 3'-phosphorothioate linkage
  modified_base 2: mod_base = OTHER; note = 2'-O-methylguanosine with a 3'-phosphorothioate linkage
  modified_base 3: mod_base = um
  modified_base 4: mod_base = gm
  modified_base 5: mod_base = OTHER; note = 2'-O-methyladenosine
  modified_base 6: mod_base = OTHER; note = 2'-O-methyladenosine
  modified_base 7: mod_base = OTHER; note = 2'-fluorocytidine
  modified_base 8: mod_base = OTHER; note = 2'-O-methyladenosine
  modified_base 9: mod_base = OTHER; note = 2'-fluorocytidine
  modified_base 10: mod_base = OTHER; note = 2'-fluorouridine
  modified_base 11: mod_base = OTHER; note = 2'-fluoroguanosine
  modified_base 12: mod_base = um
  modified_base 13: mod_base = gm
  modified_base 14: mod_base = OTHER; note = 2'-O-methyladenosine
  modified_base 15: mod_base = cm
  modified_base 16: mod_base = cm
  modified_base 17: mod_base = cm
  modified_base 18: mod_base = um
  modified_base 19: mod_base = OTHER; note = 2'-O-methyluridine with a 3'-phosphorothioate linkage
  modified_base 20: mod_base = OTHER; note = 2'-O-methylguanosine with a 3'-phosphorothioate linkage
  modified_base 21: mod_base = OTHER; note = 2'-O-methyladenosine with a 3'-phosphate substitution
tgtgaacactgtgacccttga

SEQ ID NO: 376 - RNA, 23 nt, synthetic construct
  source 1..23: mol_type = other RNA
  modified_base 1: mod_base = OTHER; note = 2'-O-methyluridine with a 3'-phosphorothioate linkage and a 5'-phosphate substitution
  modified_base 2: mod_base = OTHER; note = 2'-fluorocytidine with a 3'-phosphorothioate linkage
  modified_base 3: mod_base = OTHER; note = 2'-O-methyladenosine
  modified_base 4: mod_base = OTHER; note = 2'-O-methyladenosine
  modified_base 5: mod_base = gm
  modified_base 6: mod_base = OTHER; note = 2'-fluoroguanosine
  modified_base 7: mod_base = gm
  modified_base 8: mod_base = um
  modified_base 9: mod_base = cm
  modified_base 10: mod_base = OTHER; note = 2'-O-methyladenosine
  modified_base 11: mod_base = cm
  modified_base 12: mod_base = OTHER; note = 2'-O-methyladenosine
  modified_base 13: mod_base = gm
  modified_base 14: mod_base = OTHER; note = 2'-fluorouridine
  modified_base 15: mod_base = gm
  modified_base 16: mod_base = OTHER; note = 2'-fluorouridine
  modified_base 17: mod_base = um
  modified_base 18: mod_base = cm
  modified_base 19: mod_base = OTHER; note = 2'-O-methyladenosine
  modified_base 20: mod_base = cm
  modified_base 21: mod_base = OTHER; note = 2'-O-methyladenosine with a 3'-phosphorothioate linkage
  modified_base 22: mod_base = OTHER; note = 2'-O-methyluridine with a 3'-phosphorothioate linkage
  modified_base 23: mod_base = OTHER; note = 2'-O-methyladenosine
tcaagggtcacagtgttcacata

SEQ ID NO: 377 - RNA, 21 nt, synthetic construct
  source 1..21: mol_type = other RNA
  modified_base 1: mod_base = OTHER; note = 2'-O-methylguanosine with a 3'-phosphorothioate linkage
  modified_base 2: mod_base = OTHER; note = 2'-O-methyladenosine with a 3'-phosphorothioate linkage
  modified_base 3: mod_base = cm
  modified_base 4: mod_base = OTHER; note = 2'-O-methyladenosine
  modified_base 5: mod_base = cm
  modified_base 6: mod_base = um
  modified_base 7: mod_base = OTHER; note = 2'-fluoroadenosine
  modified_base 8: mod_base = OTHER; note = 2'-O-methyladenosine
  modified_base 9: mod_base = OTHER; note = 2'-fluoroguanosine
  modified_base 10: mod_base = OTHER; note = 2'-fluorouridine
  modified_base 11: mod_base = OTHER; note = 2'-fluorocytidine
  modified_base 12: mod_base = OTHER; note = 2'-O-methyladenosine
  modified_base 13: mod_base = OTHER; note = 2'-O-methyladenosine
  modified_base 14: mod_base = gm
  modified_base 15: mod_base = um
  modified_base 16: mod_base = um
  modified_base 17: mod_base = OTHER; note = 2'-O-methyladenosine
  modified_base 18: mod_base = OTHER; note = 2'-O-methyladenosine
  modified_base 19: mod_base = OTHER; note = 2'-O-methyladenosine with a 3'-phosphorothioate linkage
  modified_base 20: mod_base = OTHER; note = 2'-O-methylguanosine with a 3'-phosphorothioate linkage
  modified_base 21: mod_base = OTHER; note = 2'-O-methyladenosine with a 3'-phosphate substitution
gacactaagtcaagttaaaga

SEQ ID NO: 378 - RNA, 23 nt, synthetic construct
  source 1..23: mol_type = other RNA
  modified_base 1: mod_base = OTHER; note = 2'-O-methyluridine with a 3'-phosphorothioate linkage and a 5'-phosphate substitution
  modified_base 2: mod_base = OTHER; note = 2'-fluorocytidine with a 3'-phosphorothioate linkage
  modified_base 3: mod_base = um
  modified_base 4: mod_base = um
  modified_base 5: mod_base = um
  modified_base 6: mod_base = OTHER; note = 2'-fluoroadenosine
  modified_base 7: mod_base = OTHER; note = 2'-O-methyladenosine
  modified_base 8: mod_base = cm
  modified_base 9: mod_base = um
  modified_base 10: mod_base = um
  modified_base 11: mod_base = gm
  modified_base 12: mod_base = OTHER; note = 2'-O-methyladenosine
  modified_base 13: mod_base = cm
  modified_base 14: mod_base = OTHER; note = 2'-fluorouridine
  modified_base 15: mod_base = um
  modified_base 16: mod_base = OTHER; note = 2'-fluoroadenosine
  modified_base 17: mod_base = gm
  modified_base 18: mod_base = um
  modified_base 19: mod_base = gm
  modified_base 20: mod_base = um
  modified_base 21: mod_base = OTHER; note = 2'-O-methylcytidine with a 3'-phosphorothioate linkage
  modified_base 22: mod_base = OTHER; note = 2'-O-methyladenosine with a 3'-phosphorothioate linkage
  modified_base 23: mod_base = um
tctttaacttgacttagtgtcat

SEQ ID NO: 379 - RNA, 21 nt, synthetic construct
  source 1..21: mol_type = other RNA
  modified_base 1: mod_base = OTHER; note = 2'-O-methylguanosine with a 3'-phosphorothioate linkage
  modified_base 2: mod_base = OTHER; note = 2'-O-methyladenosine with a 3'-phosphorothioate linkage
  modified_base 3: mod_base = OTHER; note = 2'-O-methyladenosine
  modified_base 4: mod_base = um
  modified_base 5: mod_base = OTHER; note = 2'-O-methyladenosine
  modified_base 6: mod_base = cm
  modified_base 7: mod_base = OTHER; note = 2'-fluorocytidine
  modified_base 8: mod_base = OTHER; note = 2'-O-methyladenosine
  modified_base 9: mod_base = OTHER; note = 2'-fluoroadenosine
  modified_base 10: mod_base = OTHER; note = 2'-fluoroguanosine
  modified_base 11: mod_base = OTHER; note = 2'-fluorouridine
  modified_base 12: mod_base = gm
  modified_base 13: mod_base = cm
  modified_base 14: mod_base = OTHER; note = 2'-O-methyladenosine
  modified_base 15: mod_base = gm
  modified_base 16: mod_base = OTHER; note = 2'-O-methyladenosine
  modified_base 17: mod_base = um
  modified_base 18: mod_base = gm
  modified_base 19: mod_base = OTHER; note = 2'-O-methyluridine with a 3'-phosphorothioate linkage
  modified_base 20: mod_base = OTHER; note = 2'-O-methyladenosine with a 3'-phosphorothioate linkage
  modified_base 21: mod_base = OTHER; note = 2'-O-methyladenosine with a 3'-phosphate substitution
gaataccaagtgcagatgtaa

SEQ ID NO: 380 - RNA, 23 nt, synthetic construct
  source 1..23: mol_type = other RNA
  modified_base 1: mod_base = OTHER; note = 2'-O-methyluridine with a 3'-phosphorothioate linkage and a 5'-phosphate substitution
  modified_base 2: mod_base = OTHER; note = 2'-fluorouridine with a 3'-phosphorothioate linkage
  modified_base 3: mod_base = OTHER; note = 2'-O-methyladenosine
  modified_base 4: mod_base = cm
  modified_base 5: mod_base = OTHER; note = 2'-O-methyladenosine
  modified_base 6: mod_base = OTHER; note = 2'-fluorouridine
  modified_base 7: mod_base = cm
  modified_base 8: mod_base = um
  modified_base 9: mod_base = gm
  modified_base 10: mod_base = cm
  modified_base 11: mod_base = OTHER; note = 2'-O-methyladenosine
  modified_base 12: mod_base = cm
  modified_base 13: mod_base = um
  modified_base 14: mod_base = OTHER; note = 2'-fluorouridine
  modified_base 15: mod_base = gm
  modified_base 16: mod_base = OTHER; note = 2'-fluoroguanosine
  modified_base 17: mod_base = um
  modified_base 18: mod_base = OTHER; note = 2'-O-methyladenosine
  modified_base 19: mod_base = um
  modified_base 20: mod_base = um
  modified_base 21: mod_base = OTHER; note = 2'-O-methylcytidine with a 3'-phosphorothioate linkage
  modified_base 22: mod_base = OTHER; note = 2'-O-methyluridine with a 3'-phosphorothioate linkage
  modified_base 23: mod_base = gm
ttacatctgcacttggtattctg

SEQ ID NO: 381 - RNA, 21 nt, synthetic construct
  source 1..21: mol_type = other RNA
  modified_base 1: mod_base = OTHER; note = 2'-O-methylguanosine with a 3'-phosphorothioate linkage
  modified_base 2: mod_base = OTHER; note = 2'-O-methyladenosine with a 3'-phosphorothioate linkage
  modified_base 3: mod_base = cm
  modified_base 4: mod_base = OTHER; note = 2'-O-methyladenosine
  modified_base 5: mod_base = OTHER; note = 2'-O-methyladenosine
  modified_base 6: mod_base = um
  modified_base 7: mod_base = OTHER; note = 2'-fluoroguanosine
  modified_base 8: mod_base = um
  modified_base 9: mod_base = OTHER; note = 2'-fluorocytidine
  modified_base 10: mod_base = OTHER; note = 2'-fluorocytidine
  modified_base 11: mod_base = OTHER; note = 2'-fluoroadenosine
  modified_base 12: mod_base = OTHER; note = 2'-O-methyladenosine
  modified_base 13: mod_base = gm
  modified_base 14: mod_base = OTHER; note = 2'-O-methyladenosine
  modified_base 15: mod_base = cm
  modified_base 16: mod_base = OTHER; note = 2'-O-methyladenosine
  modified_base 17: mod_base = cm
  modified_base 18: mod_base = OTHER; note = 2'-O-methyladenosine
  modified_base 19: mod_base = OTHER; note = 2'-O-methylguanosine with a 3'-phosphorothioate linkage
  modified_base 20: mod_base = OTHER; note = 2'-O-methylcytidine with a 3'-phosphorothioate linkage
  modified_base 21: mod_base = OTHER; note = 2'-O-methyladenosine with a 3'-phosphate substitution
gacaatgtccaagacacagca

SEQ ID NO: 382 - RNA, 23 nt, synthetic construct
  source 1..23: mol_type = other RNA
  modified_base 1: mod_base = OTHER; note = 2'-O-methyluridine with a 3'-phosphorothioate linkage and a 5'-phosphate substitution
  modified_base 2: mod_base = OTHER; note = 2'-fluoroguanosine with a 3'-phosphorothioate linkage
  modified_base 3: mod_base = cm
  modified_base 4: mod_base = um
  modified_base 5: mod_base = gm
  modified_base 6: mod_base = OTHER; note = 2'-fluorouridine
  modified_base 7: mod_base = gm
  modified_base 8: mod_base = um
  modified_base 9: mod_base = cm
  modified_base 10: mod_base = um
  modified_base 11: mod_base = um
  modified_base 12: mod_base = gm
  modified_base 13: mod_base = gm
  modified_base 14: mod_base = OTHER; note = 2'-fluoroadenosine
  modified_base 15: mod_base = cm
  modified_base 16: mod_base = OTHER; note = 2'-fluoroadenosine
  modified_base 17: mod_base = um
  modified_base 18: mod_base = um
  modified_base 19: mod_base = gm
  modified_base 20: mod_base = um
  modified_base 21: mod_base = OTHER; note = 2'-O-methylcytidine with a 3'-phosphorothioate linkage
  modified_base 22: mod_base = OTHER; note = 2'-O-methyladenosine with a 3'-phosphorothioate linkage
  modified_base 23: mod_base = um
tgctgtgtcttggacattgtcat

SEQ ID NO: 383 - RNA, 21 nt, synthetic construct
  source 1..21: mol_type = other RNA
  modified_base 1: mod_base = OTHER; note = 2'-O-methyladenosine with a 3'-phosphorothioate linkage
  modified_base 2: mod_base = OTHER; note = 2'-O-methyluridine with a 3'-phosphorothioate linkage
  modified_base 3: mod_base = gm
  modified_base 4: mod_base = OTHER; note = 2'-O-methyladenosine
  modified_base 5: mod_base = OTHER; note = 2'-O-methyladenosine
  modified_base 6: mod_base = gm
  modified_base 7: mod_base = OTHER; note = 2'-fluoroguanosine
  modified_base 8: mod_base = OTHER; note = 2'-O-methyladenosine
  modified_base 9: mod_base = OTHER; note = 2'-fluorocytidine
  modified_base 10: mod_base = OTHER; note = 2'-fluoroadenosine
  modified_base 11: mod_base = OTHER; note = 2'-fluorouridine
  modified_base 12: mod_base = gm
  modified_base 13: mod_base = gm
  modified_base 14: mod_base = cm
  modified_base 15: mod_base = um
  modified_base 16: mod_base = um
  modified_base 17: mod_base = OTHER; note = 2'-O-methyladenosine
  modified_base 18: mod_base = gm
  modified_base 19: mod_base = OTHER; note = 2'-O-methyladenosine with a 3'-phosphorothioate linkage
  modified_base 20: mod_base = OTHER; note = 2'-O-methyladenosine with a 3'-phosphorothioate linkage
  modified_base 21: mod_base = OTHER; note = 2'-O-methyladenosine with a 3'-phosphate substitution
atgaaggacatggcttagaaa

SEQ ID NO: 384 - RNA, 23 nt, synthetic construct
  source 1..23: mol_type = other RNA
  modified_base 1: mod_base = OTHER; note = 2'-O-methyluridine with a 3'-phosphorothioate linkage and a 5'-phosphate substitution
  modified_base 2: mod_base = OTHER; note = 2'-fluorouridine with a 3'-phosphorothioate linkage
  modified_base 3: mod_base = um
  modified_base 4: mod_base = cm
  modified_base 5: mod_base = um
  modified_base 6: mod_base = OTHER; note = 2'-fluoroadenosine
  modified_base 7: mod_base = OTHER; note = 2'-O-methyladenosine
  modified_base 8: mod_base = gm
  modified_base 9: mod_base = cm
  modified_base 10: mod_base = cm
  modified_base 11: mod_base = OTHER; note = 2'-O-methyladenosine
  modified_base 12: mod_base = um
  modified_base 13: mod_base = gm
  modified_base 14: mod_base = OTHER; note = 2'-fluorouridine
  modified_base 15: mod_base = cm
  modified_base 16: mod_base = OTHER; note = 2'-fluorocytidine
  modified_base 17: mod_base = um
  modified_base 18: mod_base = um
  modified_base 19: mod_base = cm
  modified_base 20: mod_base = OTHER; note = 2'-O-methyladenosine
  modified_base 21: mod_base = OTHER; note = 2'-O-methyluridine with a 3'-phosphorothioate linkage
  modified_base 22: mod_base = OTHER; note = 2'-O-methylcytidine with a 3'-phosphorothioate linkage
  modified_base 23: mod_base = OTHER; note = 2'-O-methyladenosine
tttctaagccatgtccttcatca

SEQ ID NO: 385 - RNA, 21 nt, synthetic construct
  source 1..21: mol_type = other RNA
  modified_base 1: mod_base = OTHER; note = 2'-O-methyluridine with a 3'-phosphorothioate linkage
  modified_base 2: mod_base = OTHER; note = 2'-O-methyluridine with a 3'-phosphorothioate linkage
  modified_base 3: mod_base = cm
  modified_base 4: mod_base = cm
  modified_base 5: mod_base = OTHER; note = 2'-O-methyladenosine
  modified_base 6: mod_base = OTHER; note = 2'-O-methyladenosine
  modified_base 7: mod_base = OTHER; note = 2'-fluoroadenosine
  modified_base 8: mod_base = um
  modified_base 9: mod_base = OTHER; note = 2'-fluoroguanosine
  modified_base 10: mod_base = OTHER; note = 2'-fluorocytidine
  modified_base 11: mod_base = OTHER; note = 2'-fluoroadenosine
  modified_base 12: mod_base = gm
  modified_base 13: mod_base = OTHER; note = 2'-O-methyladenosine
  modified_base 14: mod_base = OTHER; note = 2'-O-methyladenosine
  modified_base 15: mod_base = gm
  modified_base 16: mod_base = OTHER; note = 2'-O-methyladenosine
  modified_base 17: mod_base = um
  modified_base 18: mod_base = gm
  modified_base 19: mod_base = OTHER; note = 2'-O-methyluridine with a 3'-phosphorothioate linkage
  modified_base 20: mod_base = OTHER; note = 2'-O-methyladenosine with a 3'-phosphorothioate linkage
  modified_base 21: mod_base = OTHER; note = 2'-O-methyladenosine with a 3'-phosphate substitution
ttccaaatgcagaagatgtaa

SEQ ID NO: 386 - RNA, 23 nt, synthetic construct
  source 1..23: mol_type = other RNA
  modified_base 1: mod_base = OTHER; note = 2'-O-methyluridine with a 3'-phosphorothioate linkage and a 5'-phosphate substitution
  modified_base 2: mod_base = OTHER; note = 2'-fluorouridine with a 3'-phosphorothioate linkage
  modified_base 3: mod_base = OTHER; note = 2'-O-methyladenosine
  modified_base 4: mod_base = cm
  modified_base 5: mod_base = OTHER; note = 2'-O-methyladenosine
  modified_base 6: mod_base = OTHER; note = 2'-fluorouridine
  modified_base 7: mod_base = cm
  modified_base 8: mod_base = um
  modified_base 9: mod_base = um
  modified_base 10: mod_base = cm
  modified_base 11: mod_base = um
  modified_base 12: mod_base = gm
  modified_base 13: mod_base = cm
  modified_base 14: mod_base = OTHER; note = 2'-fluoroadenosine
  modified_base 15: mod_base = um
  modified_base 16: mod_base = OTHER; note = 2'-fluorouridine
  modified_base 17: mod_base = um
  modified_base 18: mod_base = gm
  modified_base 19: mod_base = gm
  modified_base 20: mod_base = OTHER; note = 2'-O-methyladenosine
  modified_base 21: mod_base = OTHER; note = 2'-O-methyladenosine with a 3'-phosphorothioate linkage
  modified_base 22: mod_base = OTHER; note = 2'-O-methylguanosine with a 3'-phosphorothioate linkage
  modified_base 23: mod_base = OTHER; note = 2'-O-methyladenosine
ttacatcttctgcatttggaaga

SEQ ID NO: 387 - RNA, 21 nt, synthetic construct
  source 1..21: mol_type = other RNA
  modified_base 1: mod_base = OTHER; note = 2'-O-methylguanosine with a 3'-phosphorothioate linkage
  modified_base 2: mod_base = OTHER; note = 2'-O-methyladenosine with a 3'-phosphorothioate linkage
  modified_base 3: mod_base = gm
  modified_base 4: mod_base = OTHER; note = 2'-O-methyladenosine
  modified_base 5: mod_base = um
  modified_base 6: mod_base = cm
  modified_base 7: mod_base = OTHER; note = 2'-fluoroadenosine
  modified_base 8: mod_base = OTHER; note = 2'-O-methyladenosine
  modified_base 9: mod_base = OTHER; note = 2'-fluoroguanosine
  modified_base 10: mod_base = OTHER; note = 2'-fluoroadenosine
  modified_base 11: mod_base = OTHER; note = 2'-fluoroadenosine
  modified_base 12: mod_base = um
  modified_base 13: mod_base = gm
  modified_base 14: mod_base = OTHER; note = 2'-O-methyladenosine
  modified_base 15: mod_base = cm
  modified_base 16: mod_base = OTHER; note = 2'-O-methyladenosine
  modified_base 17: mod_base = OTHER; note = 2'-O-methyladenosine
  modified_base 18: mod_base = um
  modified_base 19: mod_base = OTHER; note = 2'-O-methylguanosine with a 3'-phosphorothioate linkage
  modified_base 20: mod_base = OTHER; note = 2'-O-methyluridine with a 3'-phosphorothioate linkage
  modified_base 21: mod_base = OTHER; note = 2'-O-methyladenosine with a 3'-phosphate substitution
gagatcaagaatgacaatgta

SEQ ID NO: 388 - RNA, 23 nt, synthetic construct
  source 1..23: mol_type = other RNA
  modified_base 1: mod_base = OTHER; note = 2'-O-methyluridine with a 3'-phosphorothioate linkage and a 5'-phosphate substitution
  modified_base 2: mod_base = OTHER; note = 2'-fluoroadenosine with a 3'-phosphorothioate linkage
  modified_base 3: mod_base = cm
  modified_base 4: mod_base = OTHER; note = 2'-O-methyladenosine
  modified_base 5: mod_base = um
  modified_base 6: mod_base = OTHER; note = 2'-fluorouridine
  modified_base 7: mod_base = gm
  modified_base 8: mod_base = um
  modified_base 9: mod_base = cm
  modified_base 10: mod_base = OTHER; note = 2'-O-methyladenosine
  modified_base 11: mod_base = um
  modified_base 12: mod_base = um
  modified_base 13: mod_base = cm
  modified_base 14: mod_base = OTHER; note = 2'-fluorouridine
  modified_base 15: mod_base = um
  modified_base 16: mod_base = OTHER; note = 2'-fluoroguanosine
  modified_base 17: mod_base = OTHER; note = 2'-O-methyladenosine
  modified_base 18: mod_base = um
  modified_base 19: mod_base = cm
  modified_base 20: mod_base = um
  modified_base 21: mod_base = OTHER; note = 2'-O-methylcytidine with a 3'-phosphorothioate linkage
  modified_base 22: mod_base = OTHER; note = 2'-O-methyladenosine with a 3'-phosphorothioate linkage
  modified_base 23: mod_base = um
tacattgtcattcttgatctcat

SEQ ID NO: 389 - RNA, 21 nt, synthetic construct
  source 1..21: mol_type = other RNA
  modified_base 1: mod_base = OTHER; note = 2'-O-methylcytidine with a 3'-phosphorothioate linkage
  modified_base 2: mod_base = OTHER; note = 2'-O-methyladenosine with a 3'-phosphorothioate linkage
  modified_base 3: mod_base = OTHER; note = 2'-O-methyladenosine
  modified_base 4: mod_base = gm
  modified_base 5: mod_base = um
  modified_base 6: mod_base = gm
  modified_base 7: mod_base = OTHER; note = 2'-fluorocytidine
  modified_base 8: mod_base = OTHER; note = 2'-O-methyladenosine
  modified_base 9: mod_base = OTHER; note = 2'-fluoroguanosine
  modified_base 10: mod_base = OTHER; note = 2'-fluoroadenosine
  modified_base 11: mod_base = OTHER; note = 2'-fluorouridine
  modified_base 12: mod_base = gm
  modified_base 13: mod_base = um
  modified_base 14: mod_base = OTHER; note = 2'-O-methyladenosine
  modified_base 15: mod_base = OTHER; note = 2'-O-methyladenosine
  modified_base 16: mod_base = OTHER; note = 2'-O-methyladenosine
  modified_base 17: mod_base = cm
  modified_base 18: mod_base = cm
  modified_base 19: mod_base = OTHER; note = 2'-O-methyladenosine with a 3'-phosphorothioate linkage
  modified_base 20: mod_base = OTHER; note = 2'-O-methyladenosine with a 3'-phosphorothioate linkage
  modified_base 21: mod_base = OTHER; note = 2'-O-methyladenosine with a 3'-phosphate substitution
caagtgcagatgtaaaccaaa

SEQ ID NO: 390 - RNA, 23 nt, synthetic construct
  source 1..23: mol_type = other RNA
  modified_base 1: mod_base = OTHER; note = 2'-O-methyluridine with a 3'-phosphorothioate linkage and a 5'-phosphate substitution
  modified_base 2: mod_base = OTHER; note = 2'-fluorouridine with a 3'-phosphorothioate linkage
  modified_base 3: mod_base = um
  modified_base 4: mod_base = gm
  modified_base 5: mod_base = gm
  modified_base 6: mod_base = OTHER; note = 2'-fluorouridine
  modified_base 7: mod_base = um
  modified_base 8: mod_base = um
  modified_base 9: mod_base = OTHER; note = 2'-O-methyladenosine
  modified_base 10: mod_base = cm
  modified_base 11: mod_base = OTHER; note = 2'-O-methyladenosine
  modified_base 12: mod_base = um
  modified_base 13: mod_base = cm
  modified_base 14: mod_base = OTHER; note = 2'-fluorouridine
  modified_base 15: mod_base = gm
  modified_base 16: mod_base = OTHER; note = 2'-fluorocytidine
  modified_base 17: mod_base = OTHER; note = 2'-O-methyladenosine
  modified_base 18: mod_base = cm
  modified_base 19: mod_base = um
  modified_base 20: mod_base = um
  modified_base 21: mod_base = OTHER; note = 2'-O-methylguanosine with a 3'-phosphorothioate linkage
  modified_base 22: mod_base = OTHER; note = 2'-O-methylguanosine with a 3'-phosphorothioate linkage
  modified_base 23: mod_base = um
tttggtttacatctgcacttggt

SEQ ID NO: 391 - RNA, 21 nt, synthetic construct
  source 1..21: mol_type = other RNA
  modified_base 1: mod_base = OTHER; note = 2'-O-methyluridine with a 3'-phosphorothioate linkage
  modified_base 2: mod_base = OTHER; note = 2'-O-methyluridine with a 3'-phosphorothioate linkage
  modified_base 3: mod_base = um
  modified_base 4: mod_base = gm
  modified_base 5: mod_base = um
  modified_base 6: mod_base = um
  modified_base 7: mod_base = OTHER; note = 2'-fluorocytidine
  modified_base 8: mod_base = gm
  modified_base 9: mod_base = OTHER; note = 2'-fluoroadenosine
  modified_base 10: mod_base = OTHER; note = 2'-fluoroadenosine
  modified_base 11: mod_base = OTHER; note = 2'-fluoroadenosine
  modified_base 12: mod_base = gm
  modified_base 13: mod_base = OTHER; note = 2'-O-methyladenosine
  modified_base 14: mod_base = OTHER; note = 2'-O-methyladenosine
  modified_base 15: mod_base = um
  modified_base 16: mod_base = gm
  modified_base 17: mod_base = gm
  modified_base 18: mod_base = um
  modified_base 19: mod_base = OTHER; note = 2'-O-methylguanosine with a 3'-phosphorothioate linkage
  modified_base 20: mod_base = OTHER; note = 2'-O-methyluridine with a 3'-phosphorothioate linkage
  modified_base 21: mod_base = OTHER; note = 2'-O-methyladenosine with a 3'-phosphate substitution
tttgttcgaaagaatggtgta

SEQ ID NO: 392 - RNA, 23 nt, synthetic construct
  source 1..23: mol_type = other RNA
  modified_base 1: mod_base = OTHER; note = 2'-O-methyluridine with a 3'-phosphorothioate linkage and a 5'-phosphate substitution
  modified_base 2: mod_base = OTHER; note = 2'-fluoroadenosine with a 3'-phosphorothioate linkage
  modified_base 3: mod_base = cm
  modified_base 4: mod_base = OTHER; note = 2'-O-methyladenosine
  modified_base 5: mod_base = cm
  modified_base 6: mod_base = OTHER; note = 2'-fluorocytidine
  modified_base 7: mod_base = OTHER; note = 2'-O-methyladenosine
  modified_base 8: mod_base = um
  modified_base 9: mod_base = um
  modified_base 10: mod_base = cm
  modified_base 11: mod_base = um
  modified_base 12: mod_base = um
  modified_base 13: mod_base = um
  modified_base 14: mod_base = OTHER; note = 2'-fluorocytidine
  modified_base 15: mod_base = gm
  modified_base 16: mod_base = OTHER; note = 2'-fluoroadenosine
  modified_base 17: mod_base = OTHER; note = 2'-O-methyladenosine
  modified_base 18: mod_base = cm
  modified_base 19: mod_base = OTHER; note = 2'-O-methyladenosine
  modified_base 20: mod_base = OTHER; note = 2'-O-methyladenosine
  modified_base 21: mod_base = OTHER; note = 2'-O-methyladenosine with a 3'-phosphorothioate linkage
  modified_base 22: mod_base = OTHER; note = 2'-O-methylguanosine with a 3'-phosphorothioate linkage
  modified_base 23: mod_base = cm
tacaccattctttcgaacaaagc

SEQ ID NO: 393 - RNA, 21 nt, synthetic construct
  source 1..21: mol_type = other RNA
  modified_base 1: mod_base = OTHER; note = 2'-O-methylcytidine with a 3'-phosphorothioate linkage
  modified_base 2: mod_base = OTHER; note = 2'-O-methyladenosine with a 3'-phosphorothioate linkage
  modified_base 3: mod_base = gm
  modified_base 4: mod_base = OTHER; note = 2'-O-methyladenosine
  modified_base 5: mod_base = OTHER; note = 2'-O-methyladenosine
  modified_base 6: mod_base = gm
  modified_base 7: mod_base = OTHER; note = 2'-fluoroadenosine
  modified_base 8: mod_base = um
  modified_base 9: mod_base = OTHER; note = 2'-fluoroguanosine
  modified_base 10: mod_base = OTHER; note = 2'-fluorouridine
  modified_base 11: mod_base = OTHER; note = 2'-fluoroadenosine
  modified_base 12: mod_base = gm
  modified_base 13: mod_base = OTHER; note = 2'-O-methyladenosine
  modified_base 14: mod_base = um
  modified_base 15: mod_base = um
  modified_base 16: mod_base = gm
  modified_base 17: mod_base = um
  modified_base 18: mod_base = gm
  modified_base 19: mod_base = OTHER; note = 2'-O-methyluridine with a 3'-phosphorothioate linkage
  modified_base 20: mod_base = OTHER; note = 2'-O-methylguanosine with a 3'-phosphorothioate linkage
  modified_base 21: mod_base = OTHER; note = 2'-O-methyladenosine with a 3'-phosphate substitution
cagaagatgtagattgtgtga

SEQ ID NO: 394 - RNA, 23 nt, synthetic construct
  source 1..23: mol_type = other RNA
  modified_base 1: mod_base = OTHER; note = 2'-O-methyluridine with a 3'-phosphorothioate linkage and a 5'-phosphate substitution
  modified_base 2: mod_base = OTHER; note = 2'-fluorocytidine with a 3'-phosphorothioate linkage
  modified_base 3: mod_base = OTHER; note = 2'-O-methyladenosine
  modified_base 4: mod_base = cm
  modified_base 5: mod_base = OTHER; note = 2'-O-methyladenosine
  modified_base 6: mod_base = OTHER; note = 2'-fluorocytidine
  modified_base 7: mod_base = OTHER; note = 2'-O-methyladenosine
  modified_base 8: mod_base = OTHER; note = 2'-O-methyladenosine
  modified_base 9: mod_base = um
  modified_base 10: mod_base = cm
  modified_base 11: mod_base = um
  modified_base 12: mod_base = OTHER; note = 2'-O-methyladenosine
  modified_base 13: mod_base = cm
  modified_base 14: mod_base = OTHER; note = 2'-fluoroadenosine
  modified_base 15: mod_base = um
  modified_base 16: mod_base = OTHER; note = 2'-fluorocytidine
  modified_base 17: mod_base = um
  modified_base 18: mod_base = um
  modified_base 19: mod_base = cm
  modified_base 20: mod_base = um
  modified_base 21: mod_base = OTHER; note = 2'-O-methylguanosine with a 3'-phosphorothioate linkage
  modified_base 22: mod_base = OTHER; note = 2'-O-methylcytidine with a 3'-phosphorothioate linkage
  modified_base 23: mod_base = OTHER; note = 2'-O-methyladenosine
tcacacaatctacatcttctgca

SEQ ID NO: 395 - RNA, 21 nt, synthetic construct
  source 1..21: mol_type = other RNA
  modified_base 1: mod_base = OTHER; note = 2'-O-methyluridine with a 3'-phosphorothioate linkage
  modified_base 2: mod_base = OTHER; note = 2'-O-methylcytidine with a 3'-phosphorothioate linkage
  modified_base 3: mod_base = um
  modified_base 4: mod_base = um
  modified_base 5: mod_base = um
  modified_base 6: mod_base = gm
  modified_base 7: mod_base = OTHER; note = 2'-fluorouridine
  modified_base 8: mod_base = OTHER; note = 2'-O-methyladenosine
  modified_base 9: mod_base = OTHER; note = 2'-fluorocytidine
  modified_base 10: mod_base = OTHER; note = 2'-fluorouridine
  modified_base 11: mod_base = OTHER; note = 2'-fluorocytidine
  modified_base 12: mod_base = um
  modified_base 13: mod_base = um
  modified_base 14: mod_base = gm
  modified_base 15: mod_base = cm
  modified_base 16: mod_base = OTHER; note = 2'-O-methyladenosine
  modified_base 17: mod_base = gm
  modified_base 18: mod_base = OTHER; note = 2'-O-methyladenosine
  modified_base 19: mod_base = OTHER; note = 2'-O-methylguanosine with a 3'-phosphorothioate linkage
  modified_base 20: mod_base = OTHER; note = 2'-O-methyladenosine with a 3'-phosphorothioate linkage
  modified_base 21: mod_base = OTHER; note = 2'-O-methyladenosine with a 3'-phosphate substitution
tctttgtactcttgcagagaa

SEQ ID NO: 396 - RNA, 23 nt, synthetic construct
  source 1..23: mol_type = other RNA
  modified_base 1: mod_base = OTHER; note = 2'-O-methyluridine with a 3'-phosphorothioate linkage and a 5'-phosphate substitution
  modified_base 2: mod_base = OTHER; note = 2'-fluorouridine with a 3'-phosphorothioate linkage
  modified_base 3: mod_base = cm
  modified_base 4: mod_base = um
  modified_base 5: mod_base = cm
  modified_base 6: mod_base = OTHER; note = 2'-fluorouridine
  modified_base 7: mod_base = gm
  modified_base 8: mod_base = cm
  modified_base 9: mod_base = OTHER; note = 2'-O-methyladenosine
  modified_base 10: mod_base = OTHER; note = 2'-O-methyladenosine
  modified_base 11: mod_base = gm
  modified_base 12: mod_base = OTHER; note = 2'-O-methyladenosine
  modified_base 13: mod_base = gm
  modified_base 14: mod_base = OTHER; note = 2'-fluorouridine
  modified_base 15: mod_base = OTHER; note = 2'-O-methyladenosine
  modified_base 16: mod_base = OTHER; note = 2'-fluorocytidine
  modified_base 17: mod_base = OTHER; note = 2'-O-methyladenosine
  modified_base 18: mod_base = OTHER; note = 2'-O-methyladenosine
  modified_base 19: mod_base = OTHER; note = 2'-O-methyladenosine
  modified_base 20: mod_base = gm
  modified_base 21: mod_base = OTHER; note = 2'-O-methyladenosine with a 3'-phosphorothioate linkage
  modified_base 22: mod_base = OTHER; note = 2'-O-methyluridine with a 3'-phosphorothioate linkage
  modified_base 23: mod_base = um
ttctctgcaagagtacaaagatt

SEQ ID NO: 397 - RNA, 21 nt, synthetic construct
  source 1..21: mol_type = other RNA
  modified_base 1: mod_base = OTHER; note = 2'-O-methylcytidine with a 3'-phosphorothioate linkage
  modified_base 2: mod_base = OTHER; note = 2'-O-methyladenosine with a 3'-phosphorothioate linkage
  modified_base 3: mod_base = cm
  modified_base 4: mod_base = um
  modified_base 5: mod_base = gm
  modified_base 6: mod_base = um
  modified_base 7: mod_base = OTHER; note = 2'-fluoroguanosine
  modified_base 8: mod_base = OTHER; note = 2'-O-methyladenosine
  modified_base 9: mod_base = OTHER; note = 2'-fluorocytidine
  modified_base 10: mod_base = OTHER; note = 2'-fluorocytidine
  modified_base 11: mod_base = OTHER; note = 2'-fluorocytidine
  modified_base 12: mod_base = um
  modified_base 13: mod_base = um
  modified_base 14: mod_base = gm
  modified_base 15: mod_base = cm
  modified_base 16: mod_base = OTHER; note = 2'-O-methyladenosine
  modified_base 17: mod_base = cm
  modified_base 18: mod_base = cm
  modified_base 19: mod_base = OTHER; note = 2'-O-methyladenosine with a 3'-phosphorothioate linkage
  modified_base 20: mod_base = OTHER; note = 2'-O-methyladenosine with a 3'-phosphorothioate linkage
  modified_base 21: mod_base = OTHER; note = 2'-O-methyladenosine with a 3'-phosphate substitution
cactgtgacccttgcaccaaa

SEQ ID NO: 398 - RNA, 23 nt, synthetic construct
  source 1..23: mol_type = other RNA
  modified_base 1: mod_base = OTHER; note = 2'-O-methyluridine with a 3'-phosphorothioate linkage and a 5'-phosphate substitution
  modified_base 2: mod_base = OTHER; note = 2'-fluorouridine with a 3'-phosphorothioate linkage
  modified_base 3: mod_base = um
  modified_base 4: mod_base = gm
  modified_base 5: mod_base = gm
  modified_base 6: mod_base = OTHER; note = 2'-fluorouridine
  modified_base 7: mod_base = gm
  modified_base 8: mod_base = cm
  modified_base 9: mod_base = OTHER; note = 2'-O-methyladenosine
  modified_base 10: mod_base = OTHER; note = 2'-O-methyladenosine
  modified_base 11: mod_base = gm
  modified_base 12: mod_base = gm
  modified_base 13: mod_base = gm
  modified_base 14: mod_base = OTHER; note = 2'-fluorouridine
  modified_base 15: mod_base = cm
  modified_base 16: mod_base = OTHER; note = 2'-fluoroadenosine
  modified_base 17: mod_base = cm
  modified_base 18: mod_base = OTHER; note = 2'-O-methyladenosine
  modified_base 19: mod_base = gm
  modified_base 20: mod_base = um
  modified_base 21: mod_base = OTHER; note = 2'-O-methylguanosine with a 3'-phosphorothioate linkage
  modified_base 22: mod_base = OTHER; note = 2'-O-methyluridine with a 3'-phosphorothioate linkage
  modified_base 23: mod_base = um
tttggtgcaagggtcacagtgtt

SEQ ID NO: 399 - RNA, 21 nt, synthetic construct
  source 1..21: mol_type = other RNA
  modified_base 1: mod_base = OTHER; note = 2'-O-methyluridine with a 3'-phosphorothioate linkage
  modified_base 2: mod_base = OTHER; note = 2'-O-methylcytidine with a 3'-phosphorothioate linkage
  modified_base 3: mod_base = cm
  modified_base 4: mod_base = OTHER; note = 2'-O-methyladenosine
  modified_base 5: mod_base = OTHER; note = 2'-O-methyladenosine
  modified_base 6: mod_base = OTHER; note = 2'-O-methyladenosine
  modified_base 7: mod_base = OTHER; note = 2'-fluorouridine
  modified_base 8: mod_base = gm
  modified_base 9: mod_base = OTHER; note = 2'-fluorocytidine
  modified_base 10: mod_base = OTHER; note = 2'-fluoroadenosine
  modified_base 11: mod_base = OTHER; note = 2'-fluoroguanosine
  modified_base 12: mod_base = OTHER; note = 2'-O-methyladenosine
  modified_base 13: mod_base = OTHER; note = 2'-O-methyladenosine
  modified_base 14: mod_base = gm
  modified_base 15: mod_base = OTHER; note = 2'-O-methyladenosine
  modified_base 16: mod_base = um
  modified_base 17: mod_base = gm
  modified_base 18: mod_base = um
  modified_base 19: mod_base = OTHER; note = 2'-O-methyladenosine with a 3'-phosphorothioate linkage
  modified_base 20: mod_base = OTHER; note = 2'-O-methylguanosine with a 3'-phosphorothioate linkage
  modified_base 21: mod_base = OTHER; note = 2'-O-methyladenosine with a 3'-phosphate substitution
tccaaatgcagaagatgtaga

SEQ ID NO: 400 - RNA, 23 nt, synthetic construct
  source 1..23: mol_type = other RNA
  modified_base 1: mod_base = OTHER; note = 2'-O-methyluridine with a 3'-phosphorothioate linkage and a 5'-phosphate substitution
  modified_base 2: mod_base = OTHER; note = 2'-fluorocytidine with a 3'-phosphorothioate linkage
  modified_base 3: mod_base = um
  modified_base 4: mod_base = OTHER; note = 2'-O-methyladenosine
  modified_base 5: mod_base = cm
  modified_base 6: mod_base = OTHER; note = 2'-fluoroadenosine
  modified_base 7: mod_base = um
  modified_base 8: mod_base = cm
  modified_base 9: mod_base = um
  modified_base 10: mod_base = um
  modified_base 11: mod_base = cm
  modified_base 12: mod_base = um
  modified_base 13: mod_base = gm
  modified_base 14: mod_base = OTHER; note = 2'-fluorocytidine
  modified_base 15: mod_base = OTHER; note = 2'-O-methyladenosine
  modified_base 16: mod_base = OTHER; note = 2'-fluorouridine
  modified_base 17: mod_base = um
  modified_base 18: mod_base = um
  modified_base 19: mod_base = gm
  modified_base 20: mod_base = gm
  modified_base 21: mod_base = OTHER; note = 2'-O-methyladenosine with a 3'-phosphorothioate linkage
  modified_base 22: mod_base = OTHER; note = 2'-O-methyladenosine with a 3'-phosphorothioate linkage
  modified_base 23: mod_base = gm
tctacatcttctgcatttggaag

SEQ ID NO: 401 - RNA, 21 nt, synthetic construct
  source 1..21: mol_type = other RNA
  modified_base 1: mod_base = OTHER; note = 2'-O-methyladenosine with a 3'-phosphorothioate linkage
  modified_base 2: mod_base = OTHER; note = 2'-O-methyladenosine with a 3'-phosphorothioate linkage
  modified_base 3: mod_base = um
  modified_base 4: mod_base = gm
  modified_base 5: mod_base = um
  modified_base 6: mod_base = cm
  modified_base 7: mod_base = OTHER; note = 2'-fluorocytidine
  modified_base 8: mod_base = OTHER; note = 2'-O-methyladenosine
  modified_base 9: mod_base = OTHER; note = 2'-fluoroadenosine
  modified_base 10: mod_base = OTHER; note = 2'-fluoroguanosine
  modified_base 11: mod_base = OTHER; note = 2'-fluoroadenosine
  modified_base 12: mod_base = cm
  modified_base 13: mod_base = OTHER; note = 2'-O-methyladenosine
  modified_base 14: mod_base = cm
  modified_base 15: mod_base = OTHER; note = 2'-O-methyladenosine
  modified_base 16: mod_base = gm
  modified_base 17: mod_base = cm
  modified_base 18: mod_base = OTHER; note = 2'-O-methyladenosine
  modified_base 19: mod_base = OTHER; note = 2'-O-methylguanosine with a 3'-phosphorothioate linkage
  modified_base 20: mod_base = OTHER; note = 2'-O-methyladenosine with a 3'-phosphorothioate linkage
  modified_base 21: mod_base = OTHER; note = 2'-O-methyladenosine with a 3'-phosphate substitution
aatgtccaagacacagcagaa

SEQ ID NO: 402 - RNA, 23 nt, synthetic construct
  source 1..23: mol_type = other RNA
  modified_base 1: mod_base = OTHER; note = 2'-O-methyluridine with a 3'-phosphorothioate linkage and a 5'-phosphate substitution
  modified_base 2: mod_base = OTHER; note = 2'-fluorouridine with a 3'-phosphorothioate linkage
  modified_base 3: mod_base = cm
  modified_base 4: mod_base = um
  modified_base 5: mod_base = gm
  modified_base 6: mod_base = OTHER; note = 2'-fluorocytidine
  modified_base 7: mod_base = um
  modified_base 8: mod_base = gm
  modified_base 9: mod_base = um
  modified_base 10: mod_base = gm
  modified_base 11: mod_base = um
  modified_base 12: mod_base = cm
  modified_base 13: mod_base = um
  modified_base 14: mod_base = OTHER; note = 2'-fluorouridine
  modified_base 15: mod_base = gm
  modified_base 16: mod_base = OTHER; note = 2'-fluoroguanosine
  modified_base 17: mod_base = OTHER; note = 2'-O-methyladenosine
  modified_base 18: mod_base = cm
  modified_base 19: mod_base = OTHER; note = 2'-O-methyladenosine
  modified_base 20: mod_base = um
  modified_base 21: mod_base = OTHER; note = 2'-O-methyluridine with a 3'-phosphorothioate linkage
  modified_base 22: mod_base = OTHER; note = 2'-O-methylguanosine with a 3'-phosphorothioate linkage
  modified_base 23: mod_base = um
ttctgctgtgtcttggacattgt

SEQ ID NO: 403 - RNA, 21 nt, synthetic construct
  source 1..21: mol_type = other RNA
  modified_base 1: mod_base = OTHER; note = 2'-O-methylguanosine with a 3'-phosphorothioate linkage
  modified_base 2: mod_base = OTHER; note = 2'-O-methylcytidine with a 3'-phosphorothioate linkage
  modified_base 3: mod_base = cm
  modified_base 4: mod_base = OTHER; note = 2'-O-methyladenosine
  modified_base 5: mod_base = OTHER; note = 2'-O-methyladenosine
  modified_base 6: mod_base = gm
  modified_base 7: mod_base = OTHER; note = 2'-fluoroadenosine
  modified_base 8: mod_base = OTHER; note = 2'-O-methyladenosine
  modified_base 9: mod_base = OTHER; note = 2'-fluoroguanosine
  modified_base 10: mod_base = OTHER; note = 2'-fluoroguanosine
  modified_base 11: mod_base = OTHER; note = 2'-fluoroguanosine
  modified_base 12: mod_base = OTHER; note = 2'-O-methyladenosine
  modified_base 13: mod_base = OTHER; note = 2'-O-methyladenosine
  modified_base 14: mod_base = gm
  modified_base 15: mod_base = gm
  modified_base 16: mod_base = OTHER; note = 2'-O-methyladenosine
  modified_base 17: mod_base = gm
  modified_base 18: mod_base = um
  modified_base 19: mod_base = OTHER; note = 2'-O-methyladenosine with a 3'-phosphorothioate linkage
  modified_base 20: mod_base = OTHER; note = 2'-O-methylcytidine with a 3'-phosphorothioate linkage
  modified_base 21: mod_base = OTHER; note = 2'-O-methyladenosine with a 3'-phosphate substitution
gccaagaagggaaggagtaca

SEQ ID NO: 404 - RNA, 23 nt, synthetic construct
  source 1..23: mol_type = other RNA
  modified_base 1: mod_base = OTHER; note = 2'-O-methyluridine with a 3'-phosphorothioate linkage and a 5'-phosphate substitution
  modified_base 2: mod_base = OTHER; note = 2'-fluoroguanosine with a 3'-phosphorothioate linkage
  modified_base 3: mod_base = um
  modified_base 4: mod_base = OTHER; note = 2'-O-methyladenosine
  modified_base 5: mod_base = cm
  modified_base 6: mod_base = OTHER; note = 2'-fluorouridine
  modified_base 7: mod_base = cm
  modified_base 8: mod_base = cm
  modified_base 9: mod_base = um
  modified_base 10: mod_base = um
  modified_base 11: mod_base = cm
  modified_base 12: mod_base = cm
  modified_base 13: mod_base = cm
  modified_base 14: mod_base = OTHER; note = 2'-fluorouridine
  modified_base 15: mod_base = um
  modified_base 16: mod_base = OTHER; note = 2'-fluorocytidine
  modified_base 17: mod_base = um
  modified_base 18: mod_base = um
  modified_base 19: mod_base = gm
  modified_base 20: mod_base = gm
  modified_base 21: mod_base = OTHER; note = 2'-O-methylcytidine with a 3'-phosphorothioate linkage
  modified_base 22: mod_base = OTHER; note = 2'-O-methyladenosine with a 3'-phosphorothioate linkage
  modified_base 23: mod_base = gm
tgtactccttcccttcttggcag

SEQ ID NO: 405 - RNA, 21 nt, synthetic construct
  source 1..21: mol_type = other RNA
  modified_base 1: mod_base = OTHER; note = 2'-O-methylcytidine with a 3'-phosphorothioate linkage
  modified_base 2: mod_base = OTHER; note = 2'-O-methyluridine with a 3'-phosphorothioate linkage
  modified_base 3: mod_base = um
  modified_base 4: mod_base = gm
  modified_base 5: mod_base = OTHER; note = 2'-O-methyladenosine
  modified_base 6: mod_base = gm
  modified_base 7: mod_base = OTHER; note = 2'-fluorouridine
  modified_base 8: mod_base = OTHER; note = 2'-O-methyladenosine
  modified_base 9: mod_base = OTHER; note = 2'-fluoroadenosine
  modified_base 10: mod_base = OTHER; note = 2'-fluoroadenosine
  modified_base 11: mod_base = OTHER; note = 2'-fluorouridine
  modified_base 12: mod_base = OTHER; note = 2'-O-methyladenosine
  modified_base 13: mod_base = um
  modified_base 14: mod_base = OTHER; note = 2'-O-methyladenosine
  modified_base 15: mod_base = um
  modified_base 16: mod_base = cm
  modified_base 17: mod_base = OTHER; note = 2'-O-methyladenosine
  modified_base 18: mod_base = cm
  modified_base 19: mod_base = OTHER; note = 2'-O-methylcytidine with a 3'-phosphorothioate linkage
  modified_base 20: mod_base = OTHER; note = 2'-O-methyladenosine with a 3'-phosphorothioate linkage
  modified_base 21: mod_base = OTHER; note = 2'-O-methyladenosine with a 3'-phosphate substitution
cttgagtaaatatatcaccaa

SEQ ID NO: 406 - RNA, 23 nt, synthetic construct
  source 1..23: mol_type = other RNA
  modified_base 1: mod_base = OTHER; note = 2'-O-methyluridine with a 3'-phosphorothioate linkage and a 5'-phosphate substitution
  modified_base 2: mod_base = OTHER; note = 2'-fluorouridine with a 3'-phosphorothioate linkage
  modified_base 3: mod_base = gm
  modified_base 4: mod_base = gm
  modified_base 5: mod_base = um
  modified_base 6: mod_base = OTHER; note = 2'-fluoroguanosine
  modified_base 7: mod_base = OTHER; note = 2'-O-methyladenosine
  modified_base 8: mod_base = um
  modified_base 9: mod_base = OTHER; note = 2'-O-methyladenosine
  modified_base 10: mod_base = um
  modified_base 11: mod_base = OTHER; note = 2'-O-methyladenosine
  modified_base 12: mod_base = um
  modified_base 13: mod_base = um
  modified_base 14: mod_base = OTHER; note = 2'-fluorouridine
  modified_base 15: mod_base = OTHER; note = 2'-O-methyladenosine
  modified_base 16: mod_base = OTHER; note = 2'-fluorocytidine
  modified_base 17: mod_base = um
  modified_base 18: mod_base = cm
  modified_base 19: mod_base = OTHER; note = 2'-O-methyladenosine
  modified_base 20: mod_base = OTHER; note = 2'-O-methyladenosine
  modified_base 21: mod_base = OTHER; note = 2'-O-methylguanosine with a 3'-phosphorothioate linkage
  modified_base 22: mod_base = OTHER; note = 2'-O-methyluridine with a 3'-phosphorothioate linkage
  modified_base 23: mod_base = cm
ttggtgatatatttactcaagtc

SEQ ID NO: 407 - RNA, 21 nt, synthetic construct
  source 1..21: mol_type = other RNA
  modified_base 1: mod_base = OTHER; note = 2'-O-methyluridine with a 3'-phosphorothioate linkage
  modified_base 2: mod_base = OTHER; note = 2'-O-methyladenosine with a 3'-phosphorothioate linkage
  modified_base 3: mod_base = gm
  modified_base 4: mod_base = OTHER; note = 2'-O-methyladenosine
  modified_base 5: mod_base = um
  modified_base 6: mod_base = gm
  modified_base 7: mod_base = OTHER; note = 2'-fluoroadenosine
  modified_base 8: mod_base = gm
  modified_base 9: mod_base = OTHER; note = 2'-fluoroadenosine
  modified_base 10: mod_base = OTHER; note = 2'-fluorouridine
  modified_base 11: mod_base = OTHER; note = 2'-fluorocytidine
  modified_base 12: mod_base = OTHER; note = 2'-O-methyladenosine
  modified_base 13: mod_base = OTHER; note = 2'-O-methyladenosine
  modified_base 14: mod_base = gm
  modified_base 15: mod_base = OTHER; note = 2'-O-methyladenosine
  modified_base 16: mod_base = OTHER; note = 2'-O-methyladenosine
  modified_base 17: mod_base = um
  modified_base 18: mod_base = gm
  modified_base 19: mod_base = OTHER; note = 2'-O-methyladenosine with a 3'-phosphorothioate linkage
  modified_base 20: mod_base = OTHER; note = 2'-O-methylcytidine with a 3'-phosphorothioate linkage
  modified_base 21: mod_base = OTHER; note = 2'-O-methyladenosine with a 3'-phosphate substitution
tagatgagatcaagaatgaca

SEQ ID NO: 408 - RNA, 23 nt, synthetic construct
  source 1..23: mol_type = other RNA
  modified_base 1: mod_base = OTHER; note = 2'-O-methyluridine with a 3'-phosphorothioate linkage and a 5'-phosphate substitution
  modified_base 2: mod_base = OTHER; note = 2'-fluoroguanosine with a 3'-phosphorothioate linkage
  modified_base 3: mod_base = um
  modified_base 4: mod_base = cm
  modified_base 5: mod_base = OTHER; note = 2'-O-methyladenosine
  modified_base 6: mod_base = OTHER; note = 2'-fluorouridine
  modified_base 7: mod_base = um
  modified_base 8: mod_base = cm
  modified_base 9: mod_base = um
  modified_base 10: mod_base = um
  modified_base 11: mod_base = gm
  modified_base 12: mod_base = OTHER; note = 2'-O-methyladenosine
  modified_base 13: mod_base = um
  modified_base 14: mod_base = OTHER; note = 2'-fluorocytidine
  modified_base 15: mod_base = um
  modified_base 16: mod_base = OTHER; note = 2'-fluorocytidine
  modified_base 17: mod_base = OTHER; note = 2'-O-methyladenosine
  modified_base 18: mod_base = um
  modified_base 19: mod_base = cm
  modified_base 20: mod_base = um
  modified_base 21: mod_base = OTHER; note = 2'-O-methyladenosine with a 3'-phosphorothioate linkage
  modified_base 22: mod_base = OTHER; note = 2'-O-methyluridine with a 3'-phosphorothioate linkage
  modified_base 23: mod_base = um
tgtcattcttgatctcatctatt

SEQ ID NO: 409 - RNA, 21 nt, synthetic construct
  source 1..21: mol_type = other RNA
  modified_base 1: mod_base = OTHER; note = 2'-O-methyluridine with a 3'-phosphorothioate linkage
  modified_base 2: mod_base = OTHER; note = 2'-O-methyluridine with a 3'-phosphorothioate linkage
  modified_base 3: mod_base = gm
  modified_base 4: mod_base = OTHER; note = 2'-O-methyladenosine
  modified_base 5: mod_base = cm
  modified_base 6: mod_base = um
  modified_base 7: mod_base = OTHER; note = 2'-fluorouridine
  modified_base 8: mod_base = gm
  modified_base 9: mod_base = OTHER; note = 2'-fluoroadenosine
  modified_base 10: mod_base = OTHER; note = 2'-fluoroguanosine
  modified_base 11: mod_base = OTHER; note = 2'-fluorouridine
  modified_base 12: mod_base = OTHER; note = 2'-O-methyladenosine
  modified_base 13: mod_base = OTHER; note = 2'-O-methyladenosine
  modified_base 14: mod_base = OTHER; note = 2'-O-methyladenosine
  modified_base 15: mod_base = um
  modified_base 16: mod_base = OTHER; note = 2'-O-methyladenosine
  modified_base 17: mod_base = um
  modified_base 18: mod_base = OTHER; note = 2'-O-methyladenosine
  modified_base 19: mod_base = OTHER; note = 2'-O-methyluridine with a 3'-phosphorothioate linkage
  modified_base 20: mod_base = OTHER; note = 2'-O-methylcytidine with a 3'-phosphorothioate linkage
  modified_base 21: mod_base = OTHER; note = 2'-O-methyladenosine with a 3'-phosphate substitution
ttgacttgagtaaatatatca

SEQ ID NO: 410 - RNA, 23 nt, synthetic construct
  source 1..23: mol_type = other RNA
  modified_base 1: mod_base = OTHER; note = 2'-O-methyluridine with a 3'-phosphorothioate linkage and a 5'-phosphate substitution
  modified_base 2: mod_base = OTHER; note = 2'-fluoroguanosine with a 3'-phosphorothioate linkage
  modified_base 3: mod_base = OTHER; note = 2'-O-methyladenosine
  modified_base 4: mod_base = um
  modified_base 5: mod_base = OTHER; note = 2'-O-methyladenosine
  modified_base 6: mod_base = OTHER; note = 2'-fluorouridine
  modified_base 7: mod_base = OTHER; note = 2'-O-methyladenosine
  modified_base 8: mod_base = um
  modified_base 9: mod_base = um
  modified_base 10: mod_base = um
  modified_base 11: mod_base = OTHER; note = 2'-O-methyladenosine
  modified_base 12: mod_base = cm
  modified_base 13: mod_base = um
  modified_base 14: mod_base = OTHER; note = 2'-fluorocytidine
  modified_base 15: mod_base = OTHER; note = 2'-O-methyladenosine
  modified_base 16: mod_base = OTHER; note = 2'-fluoroadenosine
  modified_base 17: mod_base = gm
  modified_base 18: mod_base = um
  modified_base 19: mod_base = cm
  modified_base 20: mod_base = OTHER; note = 2'-O-methyladenosine
  modified_base 21: mod_base = OTHER; note = 2'-O-methyladenosine with a 3'-phosphorothioate linkage
  modified_base 22: mod_base = OTHER; note = 2'-O-methylcytidine with a 3'-phosphorothioate linkage
  modified_base 23: mod_base = OTHER; note = 2'-O-methyladenosine
tgatatatttactcaagtcaaca

SEQ ID NO: 411 - RNA, 21 nt, synthetic construct
  source 1..21: mol_type = other RNA
  modified_base 1: mod_base = OTHER; note = 2'-O-methyladenosine with a 3'-phosphorothioate linkage
  modified_base 2: mod_base = OTHER; note = 2'-O-methylguanosine with a 3'-phosphorothioate linkage
  modified_base 3: mod_base = um
  modified_base 4: mod_base = OTHER; note = 2'-O-methyladenosine
  modified_base 5: mod_base = OTHER; note = 2'-O-methyladenosine
  modified_base 6: mod_base = OTHER; note = 2'-O-methyladenosine
  modified_base 7: mod_base = OTHER; note = 2'-fluorouridine
  modified_base 8: mod_base = OTHER; note = 2'-O-methyladenosine
  modified_base 9: mod_base = OTHER; note = 2'-fluorouridine
  modified_base 10: mod_base = OTHER; note = 2'-fluoroadenosine
  modified_base 11: mod_base = OTHER; note = 2'-fluorouridine
  modified_base 12: mod_base = cm
  modified_base 13: mod_base = OTHER; note = 2'-O-methyladenosine
  modified_base 14: mod_base = cm
  modified_base 15: mod_base = cm
  modified_base 16: mod_base = OTHER; note = 2'-O-methyladenosine
  modified_base 17: mod_base = cm
  modified_base 18: mod_base = um
  modified_base 19: mod_base = OTHER; note = 2'-O-methyladenosine with a 3'-phosphorothioate linkage
  modified_base 20: mod_base = OTHER; note = 2'-O-methyluridine with a 3'-phosphorothioate linkage
  modified_base 21: mod_base = OTHER; note = 2'-O-methyladenosine with a 3'-phosphate substitution
agtaaatatatcaccactata

SEQ ID NO: 412 - RNA, 23 nt, synthetic construct
  source 1..23: mol_type = other RNA
  modified_base 1: mod_base = OTHER; note = 2'-O-methyluridine with a 3'-phosphorothioate linkage and a 5'-phosphate substitution
  modified_base 2: mod_base = OTHER; note = 2'-fluoroadenosine with a 3'-phosphorothioate linkage
  modified_base 3: mod_base = um
  modified_base 4: mod_base = OTHER; note = 2'-O-methyladenosine
  modified_base 5: mod_base = gm
  modified_base 6: mod_base = OTHER; note = 2'-fluorouridine
  modified_base 7: mod_base = gm
  modified_base 8: mod_base = gm
  modified_base 9: mod_base = um
  modified_base 10: mod_base = gm
  modified_base 11: mod_base = OTHER; note = 2'-O-methyladenosine
  modified_base 12: mod_base = um
  modified_base 13: mod_base = OTHER; note = 2'-O-methyladenosine
  modified_base 14: mod_base = OTHER; note = 2'-fluorouridine
  modified_base 15: mod_base = OTHER; note = 2'-O-methyladenosine
  modified_base 16: mod_base = OTHER; note = 2'-fluorouridine
  modified_base 17: mod_base = um
  modified_base 18: mod_base = um
  modified_base 19: mod_base = OTHER; note = 2'-O-methyladenosine
  modified_base 20: mod_base = cm
  modified_base 21: mod_base = OTHER; note = 2'-O-methyluridine with a 3'-phosphorothioate linkage
  modified_base 22: mod_base = OTHER; note = 2'-O-methylcytidine with a 3'-phosphorothioate linkage
  modified_base 23: mod_base = OTHER; note = 2'-O-methyladenosine
tatagtggtgatatatttactca

SEQ ID NO: 413 - RNA, 21 nt, synthetic construct
  source 1..21: mol_type = other RNA
  modified_base 1: mod_base = OTHER; note = 2'-O-methyluridine with a 3'-phosphorothioate linkage
  modified_base 2: mod_base = OTHER; note = 2'-O-methyladenosine with a 3'-phosphorothioate linkage
  modified_base 3: mod_base = cm
  modified_base 4: mod_base = cm
  modified_base 5: mod_base = OTHER; note = 2'-O-methyladenosine
  modified_base 6: mod_base = OTHER; note = 2'-O-methyladenosine
  modified_base 7: mod_base = OTHER; note = 2'-fluoroguanosine
  modified_base 8: mod_base = um
  modified_base 9: mod_base = OTHER; note = 2'-fluoroguanosine
  modified_base 10: mod_base = OTHER; note = 2'-fluorocytidine
  modified_base 11: mod_base = OTHER; note = 2'-fluoroadenosine
  modified_base 12: mod_base = gm
  modified_base 13: mod_base = OTHER; note = 2'-O-methyladenosine
  modified_base 14: mod_base = um
  modified_base 15: mod_base = gm
  modified_base 16: mod_base = um
  modified_base 17: mod_base = OTHER; note = 2'-O-methyladenosine
  modified_base 18: mod_base = OTHER; note = 2'-O-methyladenosine
  modified_base 19: mod_base = OTHER; note = 2'-O-methyladenosine with a 3'-phosphorothioate linkage
  modified_base 20: mod_base = OTHER; note = 2'-O-methylcytidine with a 3'-phosphorothioate linkage
  modified_base 21: mod_base = OTHER; note = 2'-O-methyladenosine with a 3'-phosphate substitution
taccaagtgcagatgtaaaca

SEQ ID NO: 414 - RNA, 23 nt, synthetic construct
  source 1..23: mol_type = other RNA
  modified_base 1: mod_base = OTHER; note = 2'-O-methyluridine with a 3'-phosphorothioate linkage and a 5'-phosphate substitution
  modified_base 2: mod_base = OTHER; note = 2'-fluoroguanosine with a 3'-phosphorothioate linkage
  modified_base 3: mod_base = um
  modified_base 4: mod_base = um
  modified_base 5: mod_base = um
  modified_base 6: mod_base = OTHER; note = 2'-fluoroadenosine
  modified_base 7: mod_base = cm
  modified_base 8: mod_base = OTHER; note = 2'-O-methyladenosine
  modified_base 9: mod_base = um
  modified_base 10: mod_base = cm
  modified_base 11: mod_base = um
  modified_base 12: mod_base = gm
  modified_base 13: mod_base = cm
  modified_base 14: mod_base = OTHER; note = 2'-fluoroadenosine
  modified_base 15: mod_base = cm
  modified_base 16: mod_base = OTHER; note = 2'-fluorouridine
  modified_base 17: mod_base = um
  modified_base 18: mod_base = gm
  modified_base 19: mod_base = gm
  modified_base 20: mod_base = um
  modified_base 21: mod_base = OTHER; note = 2'-O-methyladenosine with a 3'-phosphorothioate linkage
  modified_base 22: mod_base = OTHER; note = 2'-O-methyluridine with a 3'-phosphorothioate linkage
  modified_base 23: mod_base = um
tgtttacatctgcacttggtatt

SEQ ID NO: 415 - RNA, 21 nt, synthetic construct
  source 1..21: mol_type = other RNA
  modified_base 1: mod_base = OTHER; note = 2'-O-methylcytidine with a 3'-phosphorothioate linkage
  modified_base 2: mod_base = OTHER; note = 2'-O-methyluridine with a 3'-phosphorothioate linkage
  modified_base 3: mod_base = gm
  modified_base 4: mod_base = um
  modified_base 5: mod_base = OTHER; note = 2'-O-methyladenosine
  modified_base 6: mod_base = um
  modified_base 7: mod_base = OTHER; note = 2'-fluoroguanosine
  modified_base 8: mod_base = um
  modified_base 9: mod_base = OTHER; note = 2'-fluoroguanosine
  modified_base 10: mod_base = OTHER; note = 2'-fluoroadenosine
  modified_base 11: mod_base = OTHER; note = 2'-fluoroadenosine
  modified_base 12: mod_base = cm
  modified_base 13: mod_base = OTHER; note = 2'-O-methyladenosine
  modified_base 14: mod_base = cm
  modified_base 15: mod_base = um
  modified_base 16: mod_base = gm
  modified_base 17: mod_base = um
  modified_base 18: mod_base = gm
  modified_base 19: mod_base = OTHER; note = 2'-O-methyladenosine with a 3'-phosphorothioate linkage
  modified_base 20: mod_base = OTHER; note = 2'-O-methylcytidine with a 3'-phosphorothioate linkage
  modified_base 21: mod_base = OTHER; note = 2'-O-methyladenosine with a 3'-phosphate substitution
ctgtatgtgaacactgtgaca

SEQ ID NO: 416 - RNA, 23 nt, synthetic construct
  source 1..23: mol_type = other RNA
  modified_base 1: mod_base = OTHER; note = 2'-O-methyluridine with a 3'-phosphorothioate linkage and a 5'-phosphate substitution
  modified_base 2: mod_base = OTHER; note = 2'-fluoroguanosine with a 3'-phosphorothioate linkage
  modified_base 3: mod_base = um
  modified_base 4: mod_base = cm
  modified_base 5: mod_base = OTHER; note = 2'-O-methyladenosine
  modified_base 6: mod_base = OTHER; note = 2'-fluorocytidine
  modified_base 7: mod_base = OTHER; note = 2'-O-methyladenosine
  modified_base 8: mod_base = gm
  modified_base 9: mod_base = um
  modified_base 10: mod_base = gm
  modified_base 11: mod_base = um
  modified_base 12: mod_base = um
  modified_base 13: mod_base = cm
  modified_base 14: mod_base = OTHER; note = 2'-fluoroadenosine
  modified_base 15: mod_base = cm
  modified_base 16: mod_base = OTHER; note = 2'-fluoroadenosine
  modified_base 17: mod_base = um
  modified_base 18: mod_base = OTHER; note = 2'-O-methyladenosine
  modified_base 19: mod_base = cm
  modified_base 20: mod_base = OTHER; note = 2'-O-methyladenosine
  modified_base 21: mod_base = OTHER; note = 2'-O-methylguanosine with a 3'-phosphorothioate linkage
  modified_base 22: mod_base = OTHER; note = 2'-O-methyluridine with a 3'-phosphorothioate linkage
  modified_base 23: mod_base = OTHER; note = 2'-O-methyladenosine
tgtcacagtgttcacatacagta

SEQ ID NO: 417 - RNA, 21 nt, synthetic construct
  source 1..21: mol_type = other RNA
  modified_base 1: mod_base = OTHER; note = 2'-O-methylguanosine with a 3'-phosphorothioate linkage
  modified_base 2: mod_base = OTHER; note = 2'-O-methyladenosine with a 3'-phosphorothioate linkage
  modified_base 3: mod_base = um
  modified_base 4: mod_base = cm
  modified_base 5: mod_base = OTHER; note = 2'-O-methyladenosine
  modified_base 6: mod_base = OTHER; note = 2'-O-methyladenosine
  modified_base 7: mod_base = OTHER; note = 2'-fluoroguanosine
  modified_base 8: mod_base = OTHER; note = 2'-O-methyladenosine
  modified_base 9: mod_base = OTHER; note = 2'-fluoroadenosine
  modified_base 10: mod_base = OTHER; note = 2'-fluorouridine
  modified_base 11: mod_base = OTHER; note = 2'-fluoroguanosine
  modified_base 12: mod_base = OTHER; note = 2'-O-methyladenosine
  modified_base 13: mod_base = cm
  modified_base 14: mod_base = OTHER; note = 2'-O-methyladenosine
  modified_base 15: mod_base = OTHER; note = 2'-O-methyladenosine
  modified_base 16: mod_base = um
  modified_base 17: mod_base = gm
  modified_base 18: mod_base = um
  modified_base 19: mod_base = OTHER; note = 2'-O-methylcytidine with a 3'-phosphorothioate linkage
  modified_base 20: mod_base = OTHER; note = 2'-O-methylcytidine with a 3'-phosphorothioate linkage
  modified_base 21: mod_base = OTHER; note = 2'-O-methyladenosine with a 3'-phosphate substitution
gatcaagaatgacaatgtcca

SEQ ID NO: 418 - RNA, 23 nt, synthetic construct
  source 1..23: mol_type = other RNA
  modified_base 1: mod_base = OTHER; note = 2'-O-methyluridine with a 3'-phosphorothioate linkage and a 5'-phosphate substitution
  modified_base 2: mod_base = OTHER; note = 2'-fluoroguanosine with a 3'-phosphorothioate linkage
  modified_base 3: mod_base = gm
  modified_base 4: mod_base = OTHER; note = 2'-O-methyladenosine
  modified_base 5: mod_base = cm
  modified_base 6: mod_base = OTHER; note = 2'-fluoroadenosine
  modified_base 7: mod_base = um
  modified_base 8: mod_base = um
  modified_base 9: mod_base = gm
  modified_base 10: mod_base = um
  modified_base 11: mod_base = cm
  modified_base 12: mod_base = OTHER; note = 2'-O-methyladenosine
  modified_base 13: mod_base = um
  modified_base 14: mod_base = OTHER; note = 2'-fluorouridine
  modified_base 15: mod_base = cm
  modified_base 16: mod_base = OTHER; note = 2'-fluorouridine
  modified_base 17: mod_base = um
  modified_base 18: mod_base = gm
  modified_base 19: mod_base = OTHER; note = 2'-O-methyladenosine
  modified_base 20: mod_base = um
  modified_base 21: mod_base = OTHER; note = 2'-O-methylcytidine with a 3'-phosphorothioate linkage
  modified_base 22: mod_base = OTHER; note = 2'-O-methyluridine with a 3'-phosphorothioate linkage
  modified_base 23: mod_base = cm
tggacattgtcattcttgatctc

SEQ ID NO: 419 - RNA, 21 nt, synthetic construct
  source 1..21: mol_type = other RNA
  modified_base 1: mod_base = OTHER; note = 2'-O-methyladenosine with a 3'-phosphorothioate linkage
  modified_base 2: mod_base = OTHER; note = 2'-O-methyluridine with a 3'-phosphorothioate linkage
  modified_base 3: mod_base = gm
  modified_base 4: mod_base = OTHER; note = 2'-O-methyladenosine
  modified_base 5: mod_base = cm
  modified_base 6: mod_base = OTHER; note = 2'-O-methyladenosine
  modified_base 7: mod_base = OTHER; note = 2'-fluorocytidine
  modified_base 8: mod_base = um
  modified_base 9: mod_base = OTHER; note = 2'-fluoroadenosine
  modified_base 10: mod_base = OTHER; note = 2'-fluoroadenosine
  modified_base 11: mod_base = OTHER; note = 2'-fluoroguanosine
  modified_base 12: mod_base = um
  modified_base 13: mod_base = cm
  modified_base 14: mod_base = OTHER; note = 2'-O-methyladenosine
  modified_base 15: mod_base = OTHER; note = 2'-O-methyladenosine
  modified_base 16: mod_base = gm
  modified_base 17: mod_base = um
  modified_base 18: mod_base = um
  modified_base 19: mod_base = OTHER; note = 2'-O-methyladenosine with a 3'-phosphorothioate linkage
  modified_base 20: mod_base = OTHER; note = 2'-O-methyladenosine with a 3'-phosphorothioate linkage
  modified_base 21: mod_base = OTHER; note = 2'-O-methyladenosine with a 3'-phosphate substitution
atgacactaagtcaagttaaa

SEQ ID NO: 420 - RNA, 23 nt, synthetic construct
  source 1..23: mol_type = other RNA
  modified_base 1: mod_base = OTHER; note = 2'-O-methyluridine with a 3'-phosphorothioate linkage and a 5'-phosphate substitution
  modified_base 2: mod_base = OTHER; note = 2'-fluorouridine with a 3'-phosphorothioate linkage
  modified_base 3: mod_base = um
  modified_base 4: mod_base = OTHER; note = 2'-O-methyladenosine
  modified_base 5: mod_base = OTHER; note = 2'-O-methyladenosine
  modified_base 6: mod_base = OTHER; note = 2'-fluorocytidine
  modified_base 7: mod_base = um
  modified_base 8: mod_base = um
  modified_base 9: mod_base = gm
  modified_base 10: mod_base = OTHER; note = 2'-O-methyladenosine
  modified_base 11: mod_base = cm
  modified_base 12: mod_base = um
  modified_base 13: mod_base = um
  modified_base 14: mod_base = OTHER; note = 2'-fluoroadenosine
  modified_base 15: mod_base = gm
  modified_base 16: mod_base = OTHER; note = 2'-fluorouridine
  modified_base 17: mod_base = gm
  modified_base 18: mod_base = um
  modified_base 19: mod_base = cm
  modified_base 20: mod_base = OTHER; note = 2'-O-methyladenosine
  modified_base 21: mod_base = OTHER; note = 2'-O-methyluridine with a 3'-phosphorothioate linkage
  modified_base 22: mod_base = OTHER; note = 2'-O-methylguanosine with a 3'-phosphorothioate linkage
  modified_base 23: mod_base = OTHER; note = 2'-O-methyladenosine
tttaacttgacttagtgtcatga

SEQ ID NO: 421 - RNA, 21 nt, synthetic construct
  source 1..21: mol_type = other RNA
  modified_base 1: mod_base = OTHER; note = 2'-O-methyladenosine with a 3'-phosphorothioate linkage
  modified_base 2: mod_base = OTHER; note = 2'-O-methyladenosine with a 3'-phosphorothioate linkage
  modified_base 3: mod_base = OTHER; note = 2'-O-methyladenosine
  modified_base 4: mod_base = um
  modified_base 5: mod_base = OTHER; note = 2'-O-methyladenosine
  modified_base 6: mod_base = gm
  modified_base 7: mod_base = OTHER; note = 2'-fluoroadenosine
  modified_base 8: mod_base = um
  modified_base 9: mod_base = OTHER; note = 2'-fluoroguanosine
  modified_base 10: mod_base = OTHER; note = 2'-fluoroadenosine
  modified_base 11: mod_base = OTHER; note = 2'-fluoroguanosine
  modified_base 12: mod_base = OTHER; note = 2'-O-methyladenosine
  modified_base 13: mod_base = um
  modified_base 14: mod_base = cm
  modified_base 15: mod_base = OTHER; note = 2'-O-methyladenosine
  modified_base 16: mod_base = OTHER; note = 2'-O-methyladenosine
  modified_base 17: mod_base = gm
  modified_base 18: mod_base = OTHER; note = 2'-O-methyladenosine
  modified_base 19: mod_base = OTHER; note = 2'-O-methyladenosine with a 3'-phosphorothioate linkage
  modified_base 20: mod_base = OTHER; note = 2'-O-methyluridine with a 3'-phosphorothioate linkage
  modified_base 21: mod_base = OTHER; note = 2'-O-methyladenosine with a 3'-phosphate substitution
aaatagatgagatcaagaata

SEQ ID NO: 422 - RNA, 23 nt, synthetic construct
  source 1..23: mol_type = other RNA
  modified_base 1: mod_base = OTHER; note = 2'-O-methyluridine with a 3'-phosphorothioate linkage and a 5'-phosphate substitution
  modified_base 2: mod_base = OTHER; note = 2'-fluoroadenosine with a 3'-phosphorothioate linkage
  modified_base 3: mod_base = um
  modified_base 4: mod_base = um
  modified_base 5: mod_base = cm
  modified_base 6: mod_base = OTHER; note = 2'-fluorouridine
  modified_base 7: mod_base = um
  modified_base 8: mod_base = gm
  modified_base 9: mod_base = OTHER; note = 2'-O-methyladenosine
  modified_base 10: mod_base = um
  modified_base 11: mod_base = cm
  modified_base 12: mod_base = um
  modified_base 13: mod_base = cm
  modified_base 14: mod_base = OTHER; note = 2'-fluoroadenosine
  modified_base 15: mod_base = um
  modified_base 16: mod_base = OTHER; note = 2'-fluorocytidine
  modified_base 17: mod_base = um
  modified_base 18: mod_base = OTHER; note = 2'-O-methyladenosine
  modified_base 19: mod_base = um
  modified_base 20: mod_base = um
  modified_base 21: mod_base = OTHER; note = 2'-O-methyluridine with a 3'-phosphorothioate linkage
  modified_base 22: mod_base = OTHER; note = 2'-O-methyluridine with a 3'-phosphorothioate linkage
  modified_base 23: mod_base = gm
tattcttgatctcatctattttg

SEQ ID NO: 423 - RNA, 21 nt, synthetic construct
  source 1..21: mol_type = other RNA
  modified_base 1: mod_base = OTHER; note = 2'-O-methylguanosine with a 3'-phosphorothioate linkage
  modified_base 2: mod_base = OTHER; note = 2'-O-methyluridine with a 3'-phosphorothioate linkage
  modified_base 3: mod_base = OTHER; note = 2'-O-methyladenosine
  modified_base 4: mod_base = um
  modified_base 5: mod_base = gm
  modified_base 6: mod_base = um
  modified_base 7: mod_base = OTHER; note = 2'-fluoroguanosine
  modified_base 8: mod_base = OTHER; note = 2'-O-methyladenosine
  modified_base 9: mod_base = OTHER; note = 2'-fluoroadenosine
  modified_base 10: mod_base = OTHER; note = 2'-fluorocytidine
  modified_base 11: mod_base = OTHER; note = 2'-fluoroadenosine
  modified_base 12: mod_base = cm
  modified_base 13: mod_base = um
  modified_base 14: mod_base = gm
  modified_base 15: mod_base = um
  modified_base 16: mod_base = gm
  modified_base 17: mod_base = OTHER; note = 2'-O-methyladenosine
  modified_base 18: mod_base = cm
  modified_base 19: mod_base = OTHER; note = 2'-O-methylcytidine with a 3'-phosphorothioate linkage
  modified_base 20: mod_base = OTHER; note = 2'-O-methylcytidine with a 3'-phosphorothioate linkage
  modified_base 21: mod_base = OTHER; note = 2'-O-methyladenosine with a 3'-phosphate substitution
gtatgtgaacactgtgaccca

SEQ ID NO: 424 - RNA, 23 nt, synthetic construct
  source 1..23: mol_type = other RNA
  modified_base 1: mod_base = OTHER; note = 2'-O-methyluridine with a 3'-phosphorothioate linkage and a 5'-phosphate substitution
  modified_base 2: mod_base = OTHER; note = 2'-fluoroguanosine with a 3'-phosphorothioate linkage
  modified_base 3: mod_base = gm
  modified_base 4: mod_base = gm
  modified_base 5: mod_base = um
  modified_base 6: mod_base = OTHER; note = 2'-fluorocytidine
  modified_base 7: mod_base = OTHER; note = 2'-O-methyladenosine
  modified_base 8: mod_base = cm
  modified_base 9: mod_base = OTHER; note = 2'-O-methyladenosine
  modified_base 10: mod_base = gm
  modified_base 11: mod_base = um
  modified_base 12: mod_base = gm
  modified_base 13: mod_base = um
  modified_base 14: mod_base = OTHER; note = 2'-fluorouridine
  modified_base 15: mod_base = cm
  modified_base 16: mod_base = OTHER; note = 2'-fluoroadenosine
  modified_base 17: mod_base = cm
  modified_base 18: mod_base = OTHER; note = 2'-O-methyladenosine
  modified_base 19: mod_base = um
  modified_base 20: mod_base = OTHER; note = 2'-O-methyladenosine
  modified_base 21: mod_base = OTHER; note = 2'-O-methylcytidine with a 3'-phosphorothioate linkage
  modified_base 22: mod_base = OTHER; note = 2'-O-methyladenosine with a 3'-phosphorothioate linkage
  modified_base 23: mod_base = gm
tgggtcacagtgttcacatacag

SEQ ID NO: 425 - RNA, 21 nt, synthetic construct
  source 1..21: mol_type = other RNA
  modified_base 1: mod_base = OTHER; note = 2'-O-methyladenosine with a 3'-phosphorothioate linkage
  modified_base 2: mod_base = OTHER; note = 2'-O-methyladenosine with a 3'-phosphorothioate linkage
  modified_base 3: mod_base = um
  modified_base 4: mod_base = OTHER; note = 2'-O-methyladenosine
  modified_base 5: mod_base = cm
  modified_base 6: mod_base = cm
  modified_base 7: mod_base = OTHER; note = 2'-fluoroadenosine
  modified_base 8: mod_base = OTHER; note = 2'-O-methyladenosine
  modified_base 9: mod_base = OTHER; note = 2'-fluoroguanosine
  modified_base 10: mod_base = OTHER; note = 2'-fluorouridine
  modified_base 11: mod_base = OTHER; note = 2'-fluoroguanosine
  modified_base 12: mod_base = cm
  modified_base 13: mod_base = OTHER; note = 2'-O-methyladenosine
  modified_base 14: mod_base = gm
  modified_base 15: mod_base = OTHER; note = 2'-O-methyladenosine
  modified_base 16: mod_base = um
  modified_base 17: mod_base = gm
  modified_base 18: mod_base = um
  modified_base 19: mod_base = OTHER; note = 2'-O-methyladenosine with a 3'-phosphorothioate linkage
  modified_base 20: mod_base = OTHER; note = 2'-O-methyladenosine with a 3'-phosphorothioate linkage
  modified_base 21: mod_base = OTHER; note = 2'-O-methyladenosine with a 3'-phosphate substitution
aataccaagtgcagatgtaaa

SEQ ID NO: 426 - RNA, 23 nt, synthetic construct
  source 1..23: mol_type = other RNA
  modified_base 1: mod_base = OTHER; note = 2'-O-methyluridine with a 3'-phosphorothioate linkage and a 5'-phosphate substitution
  modified_base 2: mod_base = OTHER; note = 2'-fluorouridine with a 3'-phosphorothioate linkage
  modified_base 3: mod_base = um
  modified_base 4: mod_base = OTHER; note = 2'-O-methyladenosine
  modified_base 5: mod_base = cm
  modified_base 6: mod_base = OTHER; note = 2'-fluoroadenosine
  modified_base 7: mod_base = um
  modified_base 8: mod_base = cm
  modified_base 9: mod_base = um
  modified_base 10: mod_base = gm
  modified_base 11: mod_base = cm
  modified_base 12: mod_base = OTHER; note = 2'-O-methyladenosine
  modified_base 13: mod_base = cm
  modified_base 14: mod_base = OTHER; note = 2'-fluorouridine
  modified_base 15: mod_base = um
  modified_base 16: mod_base = OTHER; note = 2'-fluoroguanosine
  modified_base 17: mod_base = gm
  modified_base 18: mod_base = um
  modified_base 19: mod_base = OTHER; note = 2'-O-methyladenosine
  modified_base 20: mod_base = um
  modified_base 21: mod_base = OTHER; note = 2'-O-methyluridine with a 3'-phosphorothioate linkage
  modified_base 22: mod_base = OTHER; note = 2'-O-methylcytidine with a 3'-phosphorothioate linkage
  modified_base 23: mod_base = um
tttacatctgcacttggtattct

SEQ ID NO: 427 - RNA, 21 nt, synthetic construct
  source 1..21: mol_type = other RNA
  modified_base 1: mod_base = OTHER; note = 2'-O-methyluridine with a 3'-phosphorothioate linkage
  modified_base 2: mod_base = OTHER; note = 2'-O-methylguanosine with a 3'-phosphorothioate linkage
  modified_base 3: mod_base = OTHER; note = 2'-O-methyladenosine
  modified_base 4: mod_base = gm
  modified_base 5: mod_base = OTHER; note = 2'-O-methyladenosine
  modified_base 6: mod_base = um
  modified_base 7: mod_base = OTHER; note = 2'-fluorocytidine
  modified_base 8: mod_base = OTHER; note = 2'-O-methyladenosine
  modified_base 9: mod_base = OTHER; note = 2'-fluoroadenosine
  modified_base 10: mod_base = OTHER; note = 2'-fluoroguanosine
  modified_base 11: mod_base = OTHER; note = 2'-fluoroadenosine
  modified_base 12: mod_base = OTHER; note = 2'-O-methyladenosine
  modified_base 13: mod_base = um
  modified_base 14: mod_base = gm
  modified_base 15: mod_base = OTHER; note = 2'-O-methyladenosine
  modified_base 16: mod_base = cm
  modified_base 17: mod_base = OTHER; note = 2'-O-methyladenosine
  modified_base 18: mod_base = OTHER; note = 2'-O-methyladenosine
  modified_base 19: mod_base = OTHER; note = 2'-O-methyluridine with a 3'-phosphorothioate linkage
  modified_base 20: mod_base = OTHER; note = 2'-O-methylguanosine with a 3'-phosphorothioate linkage
  modified_base 21: mod_base = OTHER; note = 2'-O-methyladenosine with a 3'-phosphate substitution
tgagatcaagaatgacaatga

SEQ ID NO: 428 - RNA, 23 nt, synthetic construct
  source 1..23: mol_type = other RNA
  modified_base 1: mod_base = OTHER; note = 2'-O-methyluridine with a 3'-phosphorothioate linkage and a 5'-phosphate substitution
  modified_base 2: mod_base = OTHER; note = 2'-fluorocytidine with a 3'-phosphorothioate linkage
  modified_base 3: mod_base = OTHER; note = 2'-O-methyladenosine
  modified_base 4: mod_base = um
  modified_base 5: mod_base = um
  modified_base 6: mod_base = OTHER; note = 2'-fluoroguanosine
  modified_base 7: mod_base = um
  modified_base 8: mod_base = cm
  modified_base 9: mod_base = OTHER; note = 2'-O-methyladenosine
  modified_base 10: mod_base = um
  modified_base 11: mod_base = um
  modified_base 12: mod_base = cm
  modified_base 13: mod_base = um
  modified_base 14: mod_base = OTHER; note = 2'-fluorouridine
  modified_base 15: mod_base = gm
  modified_base 16: mod_base = OTHER; note = 2'-fluoroadenosine
  modified_base 17: mod_base = um
  modified_base 18: mod_base = cm
  modified_base 19: mod_base = um
  modified_base 20: mod_base = cm
  modified_base 21: mod_base = OTHER; note = 2'-O-methyladenosine with a 3'-phosphorothioate linkage
  modified_base 22: mod_base = OTHER; note = 2'-O-methyluridine with a 3'-phosphorothioate linkage
  modified_base 23: mod_base = cm
tcattgtcattcttgatctcatc

SEQ ID NO: 429 - RNA, 21 nt, synthetic construct
  source 1..21: mol_type = other RNA
  modified_base 1: mod_base = OTHER; note = 2'-O-methylcytidine with a 3'-phosphorothioate linkage
  modified_base 2: mod_base = OTHER; note = 2'-O-methyluridine with a 3'-phosphorothioate linkage
  modified_base 3: mod_base = um
  modified_base 4: mod_base = um
  modified_base 5: mod_base = gm
  modified_base 6: mod_base = um
  modified_base 7: mod_base = OTHER; note = 2'-fluoroadenosine
  modified_base 8: mod_base = cm
  modified_base 9: mod_base = OTHER; note = 2'-fluorouridine
  modified_base 10: mod_base = OTHER; note = 2'-fluorocytidine
  modified_base 11: mod_base = OTHER; note = 2'-fluorouridine
  modified_base 12: mod_base = um
  modified_base 13: mod_base = gm
  modified_base 14: mod_base = cm
  modified_base 15: mod_base = OTHER; note = 2'-O-methyladenosine
  modified_base 16: mod_base = gm
  modified_base 17: mod_base = OTHER; note = 2'-O-methyladenosine
  modified_base 18: mod_base = gm
  modified_base 19: mod_base = OTHER; note = 2'-O-methyladenosine with a 3'-phosphorothioate linkage
  modified_base 20: mod_base = OTHER; note = 2'-O-methyladenosine with a 3'-phosphorothioate linkage
  modified_base 21: mod_base = OTHER; note = 2'-O-methyladenosine with a 3'-phosphate substitution
ctttgtactcttgcagagaaa

SEQ ID NO: 430 - RNA, 23 nt, synthetic construct
  source 1..23: mol_type = other RNA
  modified_base 1: mod_base = OTHER; note = 2'-O-methyluridine with a 3'-phosphorothioate linkage and a 5'-phosphate substitution
  modified_base 2: mod_base = OTHER; note = 2'-fluorouridine with a 3'-phosphorothioate linkage
  modified_base 3: mod_base = um
  modified_base 4: mod_base = cm
  modified_base 5: mod_base = um
  modified_base 6: mod_base = OTHER; note = 2'-fluorocytidine
  modified_base 7: mod_base = um
  modified_base 8: mod_base = gm
  modified_base 9: mod_base = cm
  modified_base 10: mod_base = OTHER; note = 2'-O-methyladenosine
  modified_base 11: mod_base = OTHER; note = 2'-O-methyladenosine
  modified_base 12: mod_base = gm
  modified_base 13: mod_base = OTHER; note = 2'-O-methyladenosine
  modified_base 14: mod_base = OTHER; note = 2'-fluoroguanosine
  modified_base 15: mod_base = um
  modified_base 16: mod_base = OTHER; note = 2'-fluoroadenosine
  modified_base 17: mod_base = cm
  modified_base 18: mod_base = OTHER; note = 2'-O-methyladenosine
  modified_base 19: mod_base = OTHER; note = 2'-O-methyladenosine
  modified_base 20: mod_base = OTHER; note = 2'-O-methyladenosine
  modified_base 21: mod_base = OTHER; note = 2'-O-methylguanosine with a 3'-phosphorothioate linkage
  modified_base 22: mod_base = OTHER; note = 2'-O-methyladenosine with a 3'-phosphorothioate linkage
  modified_base 23: mod_base = um
tttctctgcaagagtacaaagat

SEQ ID NO: 431 - RNA, 21 nt, synthetic construct
  source 1..21: mol_type = other RNA
  modified_base 1: mod_base = OTHER; note = 2'-O-methyluridine with a 3'-phosphorothioate linkage
  modified_base 2: mod_base = OTHER; note = 2'-O-methylguanosine with a 3'-phosphorothioate linkage
  modified_base 3: mod_base = OTHER; note = 2'-O-methyladenosine
  modified_base 4: mod_base = OTHER; note = 2'-O-methyladenosine
  modified_base 5: mod_base = gm
  modified_base 6: mod_base = cm
  modified_base 7: mod_base = OTHER; note = 2'-fluorocytidine
  modified_base 8: mod_base = OTHER; note = 2'-O-methyladenosine
  modified_base 9: mod_base = OTHER; note = 2'-fluoroadenosine
  modified_base 10: mod_base = OTHER; note = 2'-fluoroadenosine
  modified_base 11: mod_base = OTHER; note = 2'-fluoroadenosine
  modified_base 12: mod_base = um
  modified_base 13: mod_base = OTHER; note = 2'-O-methyladenosine
  modified_base 14: mod_base = gm
  modified_base 15: mod_base = OTHER; note = 2'-O-methyladenosine
  modified_base 16: mod_base = um
  modified_base 17: mod_base = gm
  modified_base 18: mod_base = OTHER; note = 2'-O-methyladenosine
  modified_base 19: mod_base = OTHER; note = 2'-O-methylguanosine with a 3'-phosphorothioate linkage
  modified_base 20: mod_base = OTHER; note = 2'-O-methyladenosine with a 3'-phosphorothioate linkage
  modified_base 21: mod_base = OTHER; note = 2'-O-methyladenosine with a 3'-phosphate substitution
tgaagccaaaatagatgagaa

SEQ ID NO: 432 - RNA, 23 nt, synthetic construct
  source 1..23: mol_type = other RNA
  modified_base 1: mod_base = OTHER; note = 2'-O-methyluridine with a 3'-phosphorothioate linkage and a 5'-phosphate substitution
  modified_base 2: mod_base = OTHER; note = 2'-fluorouridine with a 3'-phosphorothioate linkage
  modified_base 3: mod_base = cm
  modified_base 4: mod_base = um
  modified_base 5: mod_base = cm
  modified_base 6: mod_base = OTHER; note = 2'-fluoroadenosine
  modified_base 7: mod_base = um
  modified_base 8: mod_base = cm
  modified_base 9: mod_base = um
  modified_base 10: mod_base = OTHER; note = 2'-O-methyladenosine
  modified_base 11: mod_base = um
  modified_base 12: mod_base = um
  modified_base 13: mod_base = um
  modified_base 14: mod_base = OTHER; note = 2'-fluorouridine
  modified_base 15: mod_base = gm
  modified_base 16: mod_base = OTHER; note = 2'-fluoroguanosine
  modified_base 17: mod_base = cm
  modified_base 18: mod_base = um
  modified_base 19: mod_base = um
  modified_base 20: mod_base = cm
  modified_base 21: mod_base = OTHER; note = 2'-O-methyladenosine with a 3'-phosphorothioate linkage
  modified_base 22: mod_base = OTHER; note = 2'-O-methyluridine with a 3'-phosphorothioate linkage
  modified_base 23: mod_base = um
ttctcatctattttggcttcatt

SEQ ID NO: 433 - RNA, 21 nt, synthetic construct
  source 1..21: mol_type = other RNA
  modified_base 1: mod_base = OTHER; note = 2'-O-methylcytidine with a 3'-phosphorothioate linkage
  modified_base 2: mod_base = OTHER; note = 2'-O-methyladenosine with a 3'-phosphorothioate linkage
  modified_base 3: mod_base = um
  modified_base 4: mod_base = cm
  modified_base 5: mod_base = cm
  modified_base 6: mod_base = um
  modified_base 7: mod_base = OTHER; note = 2'-fluorocytidine
  modified_base 8: mod_base = OTHER; note = 2'-O-methyladenosine
  modified_base 9: mod_base = OTHER; note = 2'-fluoroadenosine
  modified_base 10: mod_base = OTHER; note = 2'-fluoroguanosine
  modified_base 11: mod_base = OTHER; note = 2'-fluoroguanosine
  modified_base 12: mod_base = OTHER; note = 2'-O-methyladenosine
  modified_base 13: mod_base = cm
  modified_base 14: mod_base = OTHER; note = 2'-O-methyladenosine
  modified_base 15: mod_base = um
  modified_base 16: mod_base = um
  modified_base 17: mod_base = OTHER; note = 2'-O-methyladenosine
  modified_base 18: mod_base = cm
  modified_base 19: mod_base = OTHER; note = 2'-O-methyluridine with a 3'-phosphorothioate linkage
  modified_base 20: mod_base = OTHER; note = 2'-O-methyladenosine with a 3'-phosphorothioate linkage
  modified_base 21: mod_base = OTHER; note = 2'-O-methyladenosine with a 3'-phosphate substitution
catcctcaaggacattactaa

SEQ ID NO: 434 - RNA, 23 nt, synthetic construct
  source 1..23: mol_type = other RNA
  modified_base 1: mod_base = OTHER; note = 2'-O-methyluridine with a 3'-phosphorothioate linkage and a 5'-phosphate substitution
  modified_base 2: mod_base = OTHER; note = 2'-fluorouridine with a 3'-phosphorothioate linkage
  modified_base 3: mod_base = OTHER; note = 2'-O-methyladenosine
  modified_base 4: mod_base = gm
  modified_base 5: mod_base = um
  modified_base 6: mod_base = OTHER; note = 2'-fluoroadenosine
  modified_base 7: mod_base = OTHER; note = 2'-O-methyladenosine
  modified_base 8: mod_base = um
  modified_base 9: mod_base = gm
  modified_base 10: mod_base = um
  modified_base 11: mod_base = cm
  modified_base 12: mod_base = cm
  modified_base 13: mod_base = um
  modified_base 14: mod_base = OTHER; note = 2'-fluorouridine
  modified_base 15: mod_base = gm
  modified_base 16: mod_base = OTHER; note = 2'-fluoroadenosine
  modified_base 17: mod_base = gm
  modified_base 18: mod_base = gm
  modified_base 19: mod_base = OTHER; note = 2'-O-methyladenosine
  modified_base 20: mod_base = um
  modified_base 21: mod_base = OTHER; note = 2'-O-methylguanosine with a 3'-phosphorothioate linkage
  modified_base 22: mod_base = OTHER; note = 2'-O-methyladenosine with a 3'-phosphorothioate linkage
  modified_base 23: mod_base = um
ttagtaatgtccttgaggatgat

SEQ ID NO: 435 - RNA, 21 nt, synthetic construct
  source 1..21: mol_type = other RNA
  modified_base 1: mod_base = OTHER; note = 2'-O-methyluridine with a 3'-phosphorothioate linkage
  modified_base 2: mod_base = OTHER; note = 2'-O-methyladenosine with a 3'-phosphorothioate linkage
  modified_base 3: mod_base = um
  modified_base 4: mod_base = gm
  modified_base 5: mod_base = um
  modified_base 6: mod_base = gm
  modified_base 7: mod_base = OTHER; note = 2'-fluoroadenosine
  modified_base 8: mod_base = OTHER; note = 2'-O-methyladenosine
  modified_base 9: mod_base = OTHER; note = 2'-fluorocytidine
  modified_base 10: mod_base = OTHER; note = 2'-fluoroadenosine
  modified_base 11: mod_base = OTHER; note = 2'-fluorocytidine
  modified_base 12: mod_base = um
  modified_base 13: mod_base = gm
  modified_base 14: mod_base = um
  modified_base 15: mod_base = gm
  modified_base 16: mod_base = OTHER; note = 2'-O-methyladenosine
  modified_base 17: mod_base = cm
  modified_base 18: mod_base = cm
  modified_base 19: mod_base = OTHER; note = 2'-O-methylcytidine with a 3'-phosphorothioate linkage
  modified_base 20: mod_base = OTHER; note = 2'-O-methyluridine with a 3'-phosphorothioate linkage
  modified_base 21: mod_base = OTHER; note = 2'-O-methyladenosine with a 3'-phosphate substitution
tatgtgaacactgtgacccta

SEQ ID NO: 436 - RNA, 23 nt, synthetic construct
  source 1..23: mol_type = other RNA
  modified_base 1: mod_base = OTHER; note = 2'-O-methyluridine with a 3'-phosphorothioate linkage and a 5'-phosphate substitution
  modified_base 2: mod_base = OTHER; note = 2'-fluoroadenosine with a 3'-phosphorothioate linkage
  modified_base 3: mod_base = gm
  modified_base 4: mod_base = gm
  modified_base 5: mod_base = gm
  modified_base 6: mod_base = OTHER; note = 2'-fluorouridine
  modified_base 7: mod_base = cm
  modified_base 8: mod_base = OTHER; note = 2'-O-methyladenosine
  modified_base 9: mod_base = cm
  modified_base 10: mod_base = OTHER; note = 2'-O-methyladenosine
  modified_base 11: mod_base = gm
  modified_base 12: mod_base = um
  modified_base 13: mod_base = gm
  modified_base 14: mod_base = OTHER; note = 2'-fluorouridine
  modified_base 15: mod_base = um
  modified_base 16: mod_base = OTHER; note = 2'-fluorocytidine
  modified_base 17: mod_base = OTHER; note = 2'-O-methyladenosine
  modified_base 18: mod_base = cm
  modified_base 19: mod_base = OTHER; note = 2'-O-methyladenosine
  modified_base 20: mod_base = um
  modified_base 21: mod_base = OTHER; note = 2'-O-methyladenosine with a 3'-phosphorothioate linkage
  modified_base 22: mod_base = OTHER; note = 2'-O-methylcytidine with a 3'-phosphorothioate linkage
  modified_base 23: mod_base = OTHER; note = 2'-O-methyladenosine
tagggtcacagtgttcacataca

SEQ ID NO: 437 - RNA, 21 nt, synthetic construct
  source 1..21: mol_type = other RNA
  modified_base 1: mod_base = OTHER; note = 2'-O-methylguanosine with a 3'-phosphorothioate linkage
  modified_base 2: mod_base = OTHER; note = 2'-O-methyluridine with a 3'-phosphorothioate linkage
  modified_base 3: mod_base = gm
  modified_base 4: mod_base = um
  modified_base 5: mod_base = um
  modified_base 6: mod_base = OTHER; note = 2'-O-methyladenosine
  modified_base 7: mod_base = OTHER; note = 2'-fluoroadenosine
  modified_base 8: mod_base = um
  modified_base 9: mod_base = OTHER; note = 2'-fluoroguanosine
  modified_base 10: mod_base = OTHER; note = 2'-fluorocytidine
  modified_base 11: mod_base = OTHER; note = 2'-fluorocytidine
  modified_base 12: mod_base = cm
  modified_base 13: mod_base = OTHER; note = 2'-O-methyladenosine
  modified_base 14: mod_base = OTHER; note = 2'-O-methyladenosine
  modified_base 15: mod_base = gm
  modified_base 16: mod_base = um
  modified_base 17: mod_base = gm
  modified_base 18: mod_base = OTHER; note = 2'-O-methyladenosine
  modified_base 19: mod_base = OTHER; note = 2'-O-methylcytidine with a 3'-phosphorothioate linkage
  modified_base 20: mod_base = OTHER; note = 2'-O-methyluridine with a 3'-phosphorothioate linkage
  modified_base 21: mod_base = OTHER; note = 2'-O-methyladenosine with a 3'-phosphate substitution
gtgttaatgcccaagtgacta

SEQ ID NO: 438 - RNA, 23 nt, synthetic construct
  source 1..23: mol_type = other RNA
  modified_base 1: mod_base = OTHER; note = 2'-O-methyluridine with a 3'-phosphorothioate linkage and a 5'-phosphate substitution
  modified_base 2: mod_base = OTHER; note = 2'-fluoroadenosine with a 3'-phosphorothioate linkage
  modified_base 3: mod_base = gm
  modified_base 4: mod_base = um
  modified_base 5: mod_base = cm
  modified_base 6: mod_base = OTHER; note = 2'-fluoroadenosine
  modified_base 7: mod_base = cm
  modified_base 8: mod_base = um
  modified_base 9: mod_base = um
  modified_base 10: mod_base = gm
  modified_base 11: mod_base = gm
  modified_base 12: mod_base = gm
  modified_base 13: mod_base = cm
  modified_base 14: mod_base = OTHER; note = 2'-fluoroadenosine
  modified_base 15: mod_base = um
  modified_base 16: mod_base = OTHER; note = 2'-fluorouridine
  modified_base 17: mod_base = OTHER; note = 2'-O-methyladenosine
  modified_base 18: mod_base = OTHER; note = 2'-O-methyladenosine
  modified_base 19: mod_base = cm
  modified_base 20: mod_base = OTHER; note = 2'-O-methyladenosine
  modified_base 21: mod_base = OTHER; note = 2'-O-methylcytidine with a 3'-phosphorothioate linkage
  modified_base 22: mod_base = OTHER; note = 2'-O-methyluridine with a 3'-phosphorothioate linkage
  modified_base 23: mod_base = um
tagtcacttgggcattaacactt

SEQ ID NO: 439 - RNA, 21 nt, synthetic construct
  source 1..21: mol_type = other RNA
  modified_base 1: mod_base = OTHER; note = 2'-O-methyluridine with a 3'-phosphorothioate linkage
  modified_base 2: mod_base = OTHER; note = 2'-O-methyluridine with a 3'-phosphorothioate linkage
  modified_base 3: mod_base = cm
  modified_base 4: mod_base = OTHER; note = 2'-O-methyladenosine
  modified_base 5: mod_base = OTHER; note = 2'-O-methyladenosine
  modified_base 6: mod_base = cm
  modified_base 7: mod_base = OTHER; note = 2'-fluorouridine
  modified_base 8: mod_base = gm
  modified_base 9: mod_base = OTHER; note = 2'-fluorocytidine
  modified_base 10: mod_base = OTHER; note = 2'-fluorouridine
  modified_base 11: mod_base = OTHER; note = 2'-fluorouridine
  modified_base 12: mod_base = cm
  modified_base 13: mod_base = gm
  modified_base 14: mod_base = um
  modified_base 15: mod_base = OTHER; note = 2'-O-methyladenosine
  modified_base 16: mod_base = OTHER; note = 2'-O-methyladenosine
  modified_base 17: mod_base = um
  modified_base 18: mod_base = um
  modified_base 19: mod_base = OTHER; note = 2'-O-methylguanosine with a 3'-phosphorothioate linkage
  modified_base 20: mod_base = OTHER; note = 2'-O-methylguanosine with a 3'-phosphorothioate linkage
  modified_base 21: mod_base = OTHER; note = 2'-O-methyladenosine with a 3'-phosphate substitution
ttcaactgcttcgtaattgga

SEQ ID NO: 440 - RNA, 23 nt, synthetic construct
  source 1..23: mol_type = other RNA
  modified_base 1: mod_base = OTHER; note = 2'-O-methyluridine with a 3'-phosphorothioate linkage and a 5'-phosphate substitution
  modified_base 2: mod_base = OTHER; note = 2'-fluorocytidine with a 3'-phosphorothioate linkage
  modified_base 3: mod_base = cm
  modified_base 4: mod_base = OTHER; note = 2'-O-methyladenosine
  modified_base 5: mod_base = OTHER; note = 2'-O-methyladenosine
  modified_base 6: mod_base = OTHER; note = 2'-fluorouridine
  modified_base 7: mod_base = um
  modified_base 8: mod_base = OTHER; note = 2'-O-methyladenosine
  modified_base 9: mod_base = cm
  modified_base 10: mod_base = gm
  modified_base 11: mod_base = OTHER; note = 2'-O-methyladenosine
  modified_base 12: mod_base = OTHER; note = 2'-O-methyladenosine
  modified_base 13: mod_base = gm
  modified_base 14: mod_base = OTHER; note = 2'-fluorocytidine
  modified_base 15: mod_base = OTHER; note = 2'-O-methyladenosine
  modified_base 16: mod_base = OTHER; note = 2'-fluoroguanosine
  modified_base 17: mod_base = um
  modified_base 18: mod_base = um
  modified_base 19: mod_base = gm
  modified_base 20: mod_base = OTHER; note = 2'-O-methyladenosine
  modified_base 21: mod_base = OTHER; note = 2'-O-methyladenosine with a 3'-phosphorothioate linkage
  modified_base 22: mod_base = OTHER; note = 2'-O-methylcytidine with a 3'-phosphorothioate linkage
  modified_base 23: mod_base = um
tccaattacgaagcagttgaact

SEQ ID NO: 441 - RNA, 21 nt, synthetic construct
  source 1..21: mol_type = other RNA
  modified_base 1: mod_base = OTHER; note = 2'-O-methyluridine with a 3'-phosphorothioate linkage
  modified_base 2: mod_base = OTHER; note = 2'-O-methylguanosine with a 3'-phosphorothioate linkage
  modified_base 3: mod_base = cm
  modified_base 4: mod_base = OTHER; note = 2'-O-methyladenosine
  modified_base 5: mod_base = gm
  modified_base 6: mod_base = OTHER; note = 2'-O-methyladenosine
  modified_base 7: mod_base = OTHER; note = 2'-fluoroadenosine
  modified_base 8: mod_base = gm
  modified_base 9: mod_base = OTHER; note = 2'-fluoroadenosine
  modified_base 10: mod_base = OTHER; note = 2'-fluorouridine
  modified_base 11: mod_base = OTHER; note = 2'-fluoroguanosine
  modified_base 12: mod_base = um
  modified_base 13: mod_base = OTHER; note = 2'-O-methyladenosine
  modified_base 14: mod_base = gm
  modified_base 15: mod_base = OTHER; note = 2'-O-methyladenosine
  modified_base 16: mod_base = um
  modified_base 17: mod_base = um
  modified_base 18: mod_base = gm
  modified_base 19: mod_base = OTHER; note = 2'-O-methyluridine with a 3'-phosphorothioate linkage
  modified_base 20: mod_base = OTHER; note = 2'-O-methylguanosine with a 3'-phosphorothioate linkage
  modified_base 21: mod_base = OTHER; note = 2'-O-methyladenosine with a 3'-phosphate substitution
tgcagaagatgtagattgtga

SEQ ID NO: 442 - RNA, 23 nt, synthetic construct
  source 1..23: mol_type = other RNA
  modified_base 1: mod_base = OTHER; note = 2'-O-methyluridine with a 3'-phosphorothioate linkage and a 5'-phosphate substitution
  modified_base 2: mod_base = OTHER; note = 2'-fluorocytidine with a 3'-phosphorothioate linkage
  modified_base 3: mod_base = OTHER; note = 2'-O-methyladenosine
  modified_base 4: mod_base = cm
  modified_base 5: mod_base = OTHER; note = 2'-O-methyladenosine
  modified_base 6: mod_base = OTHER; note = 2'-fluoroadenosine
  modified_base 7: mod_base = um
  modified_base 8: mod_base = cm
  modified_base 9: mod_base = um
  modified_base 10: mod_base = OTHER; note = 2'-O-methyladenosine
  modified_base 11: mod_base = cm
  modified_base 12: mod_base = OTHER; note = 2'-O-methyladenosine
  modified_base 13: mod_base = um
  modified_base 14: mod_base = OTHER; note = 2'-fluorocytidine
  modified_base 15: mod_base = um
  modified_base 16: mod_base = OTHER; note = 2'-fluorouridine
  modified_base 17: mod_base = cm
  modified_base 18: mod_base = um
  modified_base 19: mod_base = gm
  modified_base 20: mod_base = cm
  modified_base 21: mod_base = OTHER; note = 2'-O-methyladenosine with a 3'-phosphorothioate linkage
  modified_base 22: mod_base = OTHER; note = 2'-O-methyluridine with a 3'-phosphorothioate linkage
  modified_base 23: mod_base = um
tcacaatctacatcttctgcatt

SEQ ID NO: 443 - RNA, 21 nt, synthetic construct
  source 1..21: mol_type = other RNA
  modified_base 1: mod_base = OTHER; note = 2'-O-methylguanosine with a 3'-phosphorothioate linkage
  modified_base 2: mod_base = OTHER; note = 2'-O-methyladenosine with a 3'-phosphorothioate linkage
  modified_base 3: mod_base = gm
  modified_base 4: mod_base = um
  modified_base 5: mod_base = OTHER; note = 2'-O-methyladenosine
  modified_base 6: mod_base = OTHER; note = 2'-O-methyladenosine
  modified_base 7: mod_base = OTHER; note = 2'-fluoroadenosine
  modified_base 8: mod_base = um
  modified_base 9: mod_base = OTHER; note = 2'-fluoroadenosine
  modified_base 10: mod_base = OTHER; note = 2'-fluorouridine
  modified_base 11: mod_base = OTHER; note = 2'-fluoroadenosine
  modified_base 12: mod_base = um
  modified_base 13: mod_base = cm
  modified_base 14: mod_base = OTHER; note = 2'-O-methyladenosine
  modified_base 15: mod_base = cm
  modified_base 16: mod_base = cm
  modified_base 17: mod_base = OTHER; note = 2'-O-methyladenosine
  modified_base 18: mod_base = cm
  modified_base 19: mod_base = OTHER; note = 2'-O-methyluridine with a 3'-phosphorothioate linkage
  modified_base 20: mod_base = OTHER; note = 2'-O-methyladenosine with a 3'-phosphorothioate linkage
  modified_base 21: mod_base = OTHER; note = 2'-O-methyladenosine with a 3'-phosphate substitution
gagtaaatatatcaccactaa

SEQ ID NO: 444 - RNA, 23 nt, synthetic construct
  source 1..23: mol_type = other RNA
  modified_base 1: mod_base = OTHER; note = 2'-O-methyluridine with a 3'-phosphorothioate linkage and a 5'-phosphate substitution
  modified_base 2: mod_base = OTHER; note = 2'-fluorouridine with a 3'-phosphorothioate linkage
  modified_base 3: mod_base = OTHER; note = 2'-O-methyladenosine
  modified_base 4: mod_base = gm
  modified_base 5: mod_base = um
  modified_base 6: mod_base = OTHER; note = 2'-fluoroguanosine
  modified_base 7: mod_base = gm
  modified_base 8: mod_base = um
  modified_base 9: mod_base = gm
  modified_base 10: mod_base = OTHER; note = 2'-O-methyladenosine
  modified_base 11: mod_base = um
  modified_base 12: mod_base = OTHER; note = 2'-O-methyladenosine
  modified_base 13: mod_base = um
  modified_base 14: mod_base = OTHER; note = 2'-fluoroadenosine
  modified_base 15: mod_base = um
  modified_base 16: mod_base = OTHER; note = 2'-fluorouridine
  modified_base 17: mod_base = um
  modified_base 18: mod_base = OTHER; note = 2'-O-methyladenosine
  modified_base 19: mod_base = cm
  modified_base 20: mod_base = um
  modified_base 21: mod_base = OTHER; note = 2'-O-methylcytidine with a 3'-phosphorothioate linkage
  modified_base 22: mod_base = OTHER; note = 2'-O-methyladenosine with a 3'-phosphorothioate linkage
  modified_base 23: mod_base = OTHER; note = 2'-O-methyladenosine
ttagtggtgatatatttactcaa

SEQ ID NO: 445 - RNA, 21 nt, synthetic construct
  source 1..21: mol_type = other RNA
  modified_base 1: mod_base = OTHER; note = 2'-O-methylcytidine with a 3'-phosphorothioate linkage
  modified_base 2: mod_base = OTHER; note = 2'-O-methyladenosine with a 3'-phosphorothioate linkage
  modified_base 3: mod_base = OTHER; note = 2'-O-methyladenosine
  modified_base 4: mod_base = gm
  modified_base 5: mod_base = gm
  modified_base 6: mod_base = OTHER; note = 2'-O-methyladenosine
  modified_base 7: mod_base = OTHER; note = 2'-fluoroadenosine
  modified_base 8: mod_base = um
  modified_base 9: mod_base = OTHER; note = 2'-fluoroguanosine
  modified_base 10: mod_base = OTHER; note = 2'-fluorocytidine
  modified_base 11: mod_base = OTHER; note = 2'-fluoroadenosine
  modified_base 12: mod_base = cm
  modified_base 13: mod_base = OTHER; note = 2'-O-methyladenosine
  modified_base 14: mod_base = cm
  modified_base 15: mod_base = um
  modified_base 16: mod_base = cm
  modified_base 17: mod_base = OTHER; note = 2'-O-methyladenosine
  modified_base 18: mod_base = cm
  modified_base 19: mod_base = OTHER; note = 2'-O-methylcytidine with a 3'-phosphorothioate linkage
  modified_base 20: mod_base = OTHER; note = 2'-O-methyladenosine with a 3'-phosphorothioate linkage
  modified_base 21: mod_base = OTHER; note = 2'-O-methyladenosine with a 3'-phosphate substitution
caaggaatgcacactcaccaa

SEQ ID NO: 446 - RNA, 23 nt, synthetic construct
  source 1..23: mol_type = other RNA
  modified_base 1: mod_base = OTHER; note = 2'-O-methyluridine with a 3'-phosphorothioate linkage and a 5'-phosphate substitution
  modified_base 2: mod_base = OTHER; note = 2'-fluorouridine with a 3'-phosphorothioate linkage
  modified_base 3: mod_base = gm
  modified_base 4: mod_base = gm
  modified_base 5: mod_base = um
  modified_base 6: mod_base = OTHER; note = 2'-fluoroguanosine
  modified_base 7: mod_base = OTHER; note = 2'-O-methyladenosine
  modified_base 8: mod_base = gm
  modified_base 9: mod_base = um
  modified_base 10: mod_base = gm
  modified_base 11: mod_base = um
  modified_base 12: mod_base = gm
  modified_base 13: mod_base = cm
  modified_base 14: mod_base = OTHER; note = 2'-fluoroadenosine
  modified_base 15: mod_base = um
  modified_base 16: mod_base = OTHER; note = 2'-fluorouridine
  modified_base 17: mod_base = cm
  modified_base 18: mod_base = cm
  modified_base 19: mod_base = um
  modified_base 20: mod_base = um
  modified_base 21: mod_base = OTHER; note = 2'-O-methylguanosine with a 3'-phosphorothioate linkage
  modified_base 22: mod_base = OTHER; note = 2'-O-methyladenosine with a 3'-phosphorothioate linkage
  modified_base 23: mod_base = um
ttggtgagtgtgcattccttgat

SEQ ID NO: 447 - RNA, 21 nt, synthetic construct
  source 1..21: mol_type = other RNA
  modified_base 1: mod_base = OTHER; note = 2'-O-methylcytidine with a 3'-phosphorothioate linkage
  modified_base 2: mod_base = OTHER; note = 2'-O-methyladenosine with a 3'-phosphorothioate linkage
  modified_base 3: mod_base = gm
  modified_base 4: mod_base = gm
  modified_base 5: mod_base = um
  modified_base 6: mod_base = gm
  modified_base 7: mod_base = OTHER; note = 2'-fluoroadenosine
  modified_base 8: mod_base = OTHER; note = 2'-O-methyladenosine
  modified_base 9: mod_base = OTHER; note = 2'-fluoroadenosine
  modified_base 10: mod_base = OTHER; note = 2'-fluoroguanosine
  modified_base 11: mod_base = OTHER; note = 2'-fluoroguanosine
  modified_base 12: mod_base = OTHER; note = 2'-O-methyladenosine
  modified_base 13: mod_base = OTHER; note = 2'-O-methyladenosine
  modified_base 14: mod_base = OTHER; note = 2'-O-methyladenosine
  modified_base 15: mod_base = gm
  modified_base 16: mod_base = cm
  modified_base 17: mod_base = um
  modified_base 18: mod_base = OTHER; note = 2'-O-methyladenosine
  modified_base 19: mod_base = OTHER; note = 2'-O-methylguanosine with a 3'-phosphorothioate linkage
  modified_base 20: mod_base = OTHER; note = 2'-O-methylguanosine with a 3'-phosphorothioate linkage
  modified_base 21: mod_base = OTHER; note = 2'-O-methyladenosine with a 3'-phosphate substitution
caggtgaaaggaaagctagga

SEQ ID NO: 448 - RNA, 23 nt, synthetic construct
  source 1..23: mol_type = other RNA
  modified_base 1: mod_base = OTHER; note = 2'-O-methyluridine with a 3'-phosphorothioate linkage and a 5'-phosphate substitution
  modified_base 2: mod_base = OTHER; note = 2'-fluorocytidine with a 3'-phosphorothioate linkage
  modified_base 3: mod_base = cm
  modified_base 4: mod_base = um
  modified_base 5: mod_base = OTHER; note = 2'-O-methyladenosine
  modified_base 6: mod_base = OTHER; note = 2'-fluoroguanosine
  modified_base 7: mod_base = cm
  modified_base 8: mod_base = um
  modified_base 9: mod_base = um
  modified_base 10: mod_base = um
  modified_base 11: mod_base = cm
  modified_base 12: mod_base = cm
  modified_base 13: mod_base = um
  modified_base 14: mod_base = OTHER; note = 2'-fluorouridine
  modified_base 15: mod_base = um
  modified_base 16: mod_base = OTHER; note = 2'-fluorocytidine
  modified_base 17: mod_base = OTHER; note = 2'-O-methyladenosine
  modified_base 18: mod_base = cm
  modified_base 19: mod_base = cm
  modified_base 20: mod_base = um
  modified_base 21: mod_base = OTHER; note = 2'-O-methylguanosine with a 3'-phosphorothioate linkage
  modified_base 22: mod_base = OTHER; note = 2'-O-methylguanosine with a 3'-phosphorothioate linkage
  modified_base 23: mod_base = OTHER; note = 2'-O-methyladenosine
tcctagctttcctttcacctgga

SEQ ID NO: 449 - RNA, 21 nt, synthetic construct
  source 1..21: mol_type = other RNA
  modified_base 1: mod_base = OTHER; note = 2'-O-methyladenosine with a 3'-phosphorothioate linkage
  modified_base 2: mod_base = OTHER; note = 2'-O-methyladenosine with a 3'-phosphorothioate linkage
  modified_base 3: mod_base = um
  modified_base 4: mod_base = gm
  modified_base 5: mod_base = OTHER; note = 2'-O-methyladenosine
  modified_base 6: mod_base = cm
  modified_base 7: mod_base = OTHER; note = 2'-fluoroadenosine
  modified_base 8: mod_base = OTHER; note = 2'-O-methyladenosine
  modified_base 9: mod_base = OTHER; note = 2'-fluorouridine
  modified_base 10: mod_base = OTHER; note = 2'-fluoroguanosine
  modified_base 11: mod_base = OTHER; note = 2'-fluorouridine
  modified_base 12: mod_base = cm
  modified_base 13: mod_base = cm
  modified_base 14: mod_base = OTHER; note = 2'-O-methyladenosine
  modified_base 15: mod_base = OTHER; note = 2'-O-methyladenosine
  modified_base 16: mod_base = gm
  modified_base 17: mod_base = OTHER; note = 2'-O-methyladenosine
  modified_base 18: mod_base = cm
  modified_base 19: mod_base = OTHER; note = 2'-O-methyladenosine with a 3'-phosphorothioate linkage
  modified_base 20: mod_base = OTHER; note = 2'-O-methylcytidine with a 3'-phosphorothioate linkage
  modified_base 21: mod_base = OTHER; note = 2'-O-methyladenosine with a 3'-phosphate substitution
aatgacaatgtccaagacaca

SEQ ID NO: 450 - RNA, 23 nt, synthetic construct
  source 1..23: mol_type = other RNA
  modified_base 1: mod_base = OTHER; note = 2'-O-methyluridine with a 3'-phosphorothioate linkage and a 5'-phosphate substitution
  modified_base 2: mod_base = OTHER; note = 2'-fluoroguanosine with a 3'-phosphorothioate linkage
  modified_base 3: mod_base = um
  modified_base 4: mod_base = gm
  modified_base 5: mod_base = um
  modified_base 6: mod_base = OTHER; note = 2'-fluorocytidine
  modified_base 7: mod_base = um
  modified_base 8: mod_base = um
  modified_base 9: mod_base = gm
  modified_base 10: mod_base = gm
  modified_base 11: mod_base = OTHER; note = 2'-O-methyladenosine
  modified_base 12: mod_base = cm
  modified_base 13: mod_base = OTHER; note = 2'-O-methyladenosine
  modified_base 14: mod_base = OTHER; note = 2'-fluorouridine
  modified_base 15: mod_base = um
  modified_base 16: mod_base = OTHER; note = 2'-fluoroguanosine
  modified_base 17: mod_base = um
  modified_base 18: mod_base = cm
  modified_base 19: mod_base = OTHER; note = 2'-O-methyladenosine
  modified_base 20: mod_base = um
  modified_base 21: mod_base = OTHER; note = 2'-O-methyluridine with a 3'-phosphorothioate linkage
  modified_base 22: mod_base = OTHER; note = 2'-O-methylcytidine with a 3'-phosphorothioate linkage
  modified_base 23: mod_base = um
tgtgtcttggacattgtcattct

SEQ ID NO: 451 - RNA, 21 nt, synthetic construct
  source 1..21: mol_type = other RNA
  modified_base 1: mod_base = OTHER; note = 2'-O-methylguanosine with a 3'-phosphorothioate linkage
  modified_base 2: mod_base = OTHER; note = 2'-O-methylguanosine with a 3'-phosphorothioate linkage
  modified_base 3: mod_base = OTHER; note = 2'-O-methyladenosine
  modified_base 4: mod_base = OTHER; note = 2'-O-methyladenosine
  modified_base 5: mod_base = um
  modified_base 6: mod_base = gm
  modified_base 7: mod_base = OTHER; note = 2'-fluorocytidine
  modified_base 8: mod_base = OTHER; note = 2'-O-methyladenosine
  modified_base 9: mod_base = OTHER; note = 2'-fluorocytidine
  modified_base 10: mod_base = OTHER; note = 2'-fluoroadenosine
  modified_base 11: mod_base = OTHER; note = 2'-fluorocytidine
  modified_base 12: mod_base = um
  modified_base 13: mod_base = cm
  modified_base 14: mod_base = OTHER; note = 2'-O-methyladenosine
  modified_base 15: mod_base = cm
  modified_base 16: mod_base = cm
  modified_base 17: mod_base = OTHER; note = 2'-O-methyladenosine
  modified_base 18: mod_base = gm
  modified_base 19: mod_base = OTHER; note = 2'-O-methylcytidine with a 3'-phosphorothioate linkage
  modified_base 20: mod_base = OTHER; note = 2'-O-methyladenosine with a 3'-phosphorothioate linkage
  modified_base 21: mod_base = OTHER; note = 2'-O-methyladenosine with a 3'-phosphate substitution
ggaatgcacactcaccagcaa

SEQ ID NO: 452 - RNA, 23 nt, synthetic construct
  source 1..23: mol_type = other RNA
  modified_base 1: mod_base = OTHER; note = 2'-O-methyluridine with a 3'-phosphorothioate linkage and a 5'-phosphate substitution
  modified_base 2: mod_base = OTHER; note = 2'-fluorouridine with a 3'-phosphorothioate linkage
  modified_base 3: mod_base = gm
  modified_base 4: mod_base = cm
  modified_base 5: mod_base = um
  modified_base 6: mod_base = OTHER; note = 2'-fluoroguanosine
  modified_base 7: mod_base = gm
  modified_base 8: mod_base = um
  modified_base 9: mod_base = gm
  modified_base 10: mod_base = OTHER; note = 2'-O-methyladenosine
  modified_base 11: mod_base = gm
  modified_base 12: mod_base = um
  modified_base 13: mod_base = gm
  modified_base 14: mod_base = OTHER; note = 2'-fluorouridine
  modified_base 15: mod_base = gm
  modified_base 16: mod_base = OTHER; note = 2'-fluorocytidine
  modified_base 17: mod_base = OTHER; note = 2'-O-methyladenosine
  modified_base 18: mod_base = um
  modified_base 19: mod_base = um
  modified_base 20: mod_base = cm
  modified_base 21: mod_base = OTHER; note = 2'-O-methylcytidine with a 3'-phosphorothioate linkage
  modified_base 22: mod_base = OTHER; note = 2'-O-methyluridine with a 3'-phosphorothioate linkage
  modified_base 23: mod_base = um
ttgctggtgagtgtgcattcctt

SEQ ID NO: 453 - RNA, 21 nt, synthetic construct
  source 1..21: mol_type = other RNA
  modified_base 1: mod_base = OTHER; note = 2'-O-methylcytidine with a 3'-phosphorothioate linkage
  modified_base 2: mod_base = OTHER; note = 2'-O-methylcytidine with a 3'-phosphorothioate linkage
  modified_base 3: mod_base = um
  modified_base 4: mod_base = gm
  modified_base 5: mod_base = um
  modified_base 6: mod_base = cm
  modified_base 7: mod_base = OTHER; note = 2'-fluorocytidine
  modified_base 8: mod_base = um
  modified_base 9: mod_base = OTHER; note = 2'-fluorocytidine
  modified_base 10: mod_base = OTHER; note = 2'-fluorocytidine
  modified_base 11: mod_base = OTHER; note = 2'-fluoroadenosine
  modified_base 12: mod_base = gm
  modified_base 13: mod_base = gm
  modified_base 14: mod_base = um
  modified_base 15: mod_base = gm
  modified_base 16: mod_base = OTHER; note = 2'-O-methyladenosine
  modified_base 17: mod_base = OTHER; note = 2'-O-methyladenosine
  modified_base 18: mod_base = OTHER; note = 2'-O-methyladenosine
  modified_base 19: mod_base = OTHER; note = 2'-O-methylguanosine with a 3'-phosphorothioate linkage
  modified_base 20: mod_base = OTHER; note = 2'-O-methylguanosine with a 3'-phosphorothioate linkage
  modified_base 21: mod_base = OTHER; note = 2'-O-methyladenosine with a 3'-phosphate substitution
cctgtcctccaggtgaaagga

SEQ ID NO: 454 - RNA, 23 nt, synthetic construct
  source 1..23: mol_type = other RNA
  modified_base 1: mod_base = OTHER; note = 2'-O-methyluridine with a 3'-phosphorothioate linkage and a 5'-phosphate substitution
  modified_base 2: mod_base = OTHER; note = 2'-fluorocytidine with a 3'-phosphorothioate linkage
  modified_base 3: mod_base = cm
  modified_base 4: mod_base = um
  modified_base 5: mod_base = um
  modified_base 6: mod_base = OTHER; note = 2'-fluorouridine
  modified_base 7: mod_base = cm
  modified_base 8: mod_base = OTHER; note = 2'-O-methyladenosine
  modified_base 9: mod_base = cm
  modified_base 10: mod_base = cm
  modified_base 11: mod_base = um
  modified_base 12: mod_base = gm
  modified_base 13: mod_base = gm
  modified_base 14: mod_base = OTHER; note = 2'-fluoroadenosine
  modified_base 15: mod_base = gm
  modified_base 16: mod_base = OTHER; note = 2'-fluoroguanosine
  modified_base 17: mod_base = OTHER; note = 2'-O-methyladenosine
  modified_base 18: mod_base = cm
  modified_base 19: mod_base = OTHER; note = 2'-O-methyladenosine
  modified_base 20: mod_base = gm
  modified_base 21: mod_base = OTHER; note = 2'-O-methylguanosine with a 3'-phosphorothioate linkage
  modified_base 22: mod_base = OTHER; note = 2'-O-methylguanosine with a 3'-phosphorothioate linkage
  modified_base 23: mod_base = cm
tcctttcacctggaggacagggc

SEQ ID NO: 455 - RNA, 21 nt, synthetic construct
  source 1..21: mol_type = other RNA
  modified_base 1: mod_base = OTHER; note = 2'-O-methyladenosine with a 3'-phosphorothioate linkage
  modified_base 2: mod_base = OTHER; note = 2'-O-methyluridine with a 3'-phosphorothioate linkage
  modified_base 3: mod_base = gm
  modified_base 4: mod_base = cm
  modified_base 5: mod_base = OTHER; note = 2'-O-methyladenosine
  modified_base 6: mod_base = gm
  modified_base 7: mod_base = OTHER; note = 2'-fluoroadenosine
  modified_base 8: mod_base = OTHER; note = 2'-O-methyladenosine
  modified_base 9: mod_base = OTHER; note = 2'-fluoroguanosine
  modified_base 10: mod_base = OTHER; note = 2'-fluoroadenosine
  modified_base 11: mod_base = OTHER; note = 2'-fluorouridine
  modified_base 12: mod_base = gm
  modified_base 13: mod_base = um
  modified_base 14: mod_base = OTHER; note = 2'-O-methyladenosine
  modified_base 15: mod_base = gm
  modified_base 16: mod_base = OTHER; note = 2'-O-methyladenosine
  modified_base 17: mod_base = um
  modified_base 18: mod_base = um
  modified_base 19: mod_base = OTHER; note = 2'-O-methylguanosine with a 3'-phosphorothioate linkage
  modified_base 20: mod_base = OTHER; note = 2'-O-methyluridine with a 3'-phosphorothioate linkage
  modified_base 21: mod_base = OTHER; note = 2'-O-methyladenosine with a 3'-phosphate substitution
atgcagaagatgtagattgta

SEQ ID NO: 456 - RNA, 23 nt, synthetic construct
  source 1..23: mol_type = other RNA
  modified_base 1: mod_base = OTHER; note = 2'-O-methyluridine with a 3'-phosphorothioate linkage and a 5'-phosphate substitution
  modified_base 2: mod_base = OTHER; note = 2'-fluoroadenosine with a 3'-phosphorothioate linkage
  modified_base 3: mod_base = cm
  modified_base 4: mod_base = OTHER; note = 2'-O-methyladenosine
  modified_base 5: mod_base = OTHER; note = 2'-O-methyladenosine
  modified_base 6: mod_base = OTHER; note = 2'-fluorouridine
  modified_base 7: mod_base = cm
  modified_base 8: mod_base = um
  modified_base 9: mod_base = OTHER; note = 2'-O-methyladenosine
  modified_base 10: mod_base = cm
  modified_base 11: mod_base = OTHER; note = 2'-O-methyladenosine
  modified_base 12: mod_base = um
  modified_base 13: mod_base = cm
  modified_base 14: mod_base = OTHER; note = 2'-fluorouridine
  modified_base 15: mod_base = um
  modified_base 16: mod_base = OTHER; note = 2'-fluorocytidine
  modified_base 17: mod_base = um
  modified_base 18: mod_base = gm
  modified_base 19: mod_base = cm
  modified_base 20: mod_base = OTHER; note = 2'-O-methyladenosine
  modified_base 21: mod_base = OTHER; note = 2'-O-methyluridine with a 3'-phosphorothioate linkage
  modified_base 22: mod_base = OTHER; note = 2'-O-methyluridine with a 3'-phosphorothioate linkage
  modified_base 23: mod_base = um
tacaatctacatcttctgcattt

SEQ ID NO: 457 - RNA, 21 nt, synthetic construct
  source 1..21: mol_type = other RNA
  modified_base 1: mod_base = OTHER; note = 2'-O-methyluridine with a 3'-phosphorothioate linkage
  modified_base 2: mod_base = OTHER; note = 2'-O-methyluridine with a 3'-phosphorothioate linkage
  modified_base 3: mod_base = gm
  modified_base 4: mod_base = um
  modified_base 5: mod_base = gm
  modified_base 6: mod_base = um
  modified_base 7: mod_base = OTHER; note = 2'-fluoroguanosine
  modified_base 8: mod_base = OTHER; note = 2'-O-methyladenosine
  modified_base 9: mod_base = OTHER; note = 2'-fluorouridine
  modified_base 10: mod_base = OTHER; note = 2'-fluoroguanosine
  modified_base 11: mod_base = OTHER; note = 2'-fluoroadenosine
  modified_base 12: mod_base = OTHER; note = 2'-O-methyladenosine
  modified_base 13: mod_base = gm
  modified_base 14: mod_base = gm
  modified_base 15: mod_base = OTHER; note = 2'-O-methyladenosine
  modified_base 16: mod_base = cm
  modified_base 17: mod_base = OTHER; note = 2'-O-methyladenosine
  modified_base 18: mod_base = um
  modified_base 19: mod_base = OTHER; note = 2'-O-methylguanosine with a 3'-phosphorothioate linkage
  modified_base 20: mod_base = OTHER; note = 2'-O-methylguanosine with a 3'-phosphorothioate linkage
  modified_base 21: mod_base = OTHER; note = 2'-O-methyladenosine with a 3'-phosphate substitution
ttgtgtgatgaaggacatgga

SEQ ID NO: 458 - RNA, 23 nt, synthetic construct
  source 1..23: mol_type = other RNA
  modified_base 1: mod_base = OTHER; note = 2'-O-methyluridine with a 3'-phosphorothioate linkage and a 5'-phosphate substitution
  modified_base 2: mod_base = OTHER; note = 2'-fluorocytidine with a 3'-phosphorothioate linkage
  modified_base 3: mod_base = cm
  modified_base 4: mod_base = OTHER; note = 2'-O-methyladenosine
  modified_base 5: mod_base = um
  modified_base 6: mod_base = OTHER; note = 2'-fluoroguanosine
  modified_base 7: mod_base = um
  modified_base 8: mod_base = cm
  modified_base 9: mod_base = cm
  modified_base 10: mod_base = um
  modified_base 11: mod_base = um
  modified_base 12: mod_base = cm
  modified_base 13: mod_base = OTHER; note = 2'-O-methyladenosine
  modified_base 14: mod_base = OTHER; note = 2'-fluorouridine
  modified_base 15: mod_base = cm
  modified_base 16: mod_base = OTHER; note = 2'-fluoroadenosine
  modified_base 17: mod_base = cm
  modified_base 18: mod_base = OTHER; note = 2'-O-methyladenosine
  modified_base 19: mod_base = cm
  modified_base 20: mod_base = OTHER; note = 2'-O-methyladenosine
  modified_base 21: mod_base = OTHER; note = 2'-O-methyladenosine with a 3'-phosphorothioate linkage
  modified_base 22: mod_base = OTHER; note = 2'-O-methyluridine with a 3'-phosphorothioate linkage
  modified_base 23: mod_base = cm
tccatgtccttcatcacacaatc

SEQ ID NO: 459 - RNA, 21 nt, synthetic construct
  source 1..21: mol_type = other RNA
  modified_base 1: mod_base = OTHER; note = 2'-O-methyladenosine with a 3'-phosphorothioate linkage
  modified_base 2: mod_base = OTHER; note = 2'-O-methyladenosine with a 3'-phosphorothioate linkage
  modified_base 3: mod_base = OTHER; note = 2'-O-methyladenosine
  modified_base 4: mod_base = gm
  modified_base 5: mod_base = um
  modified_base 6: mod_base = um
  modified_base 7: mod_base = OTHER; note = 2'-fluorocytidine
  modified_base 8: mod_base = OTHER; note = 2'-O-methyladenosine
  modified_base 9: mod_base = OTHER; note = 2'-fluoroadenosine
  modified_base 10: mod_base = OTHER; note = 2'-fluorocytidine
  modified_base 11: mod_base = OTHER; note = 2'-fluorouridine
  modified_base 12: mod_base = gm
  modified_base 13: mod_base = cm
  modified_base 14: mod_base = um
  modified_base 15: mod_base = um
  modified_base 16: mod_base = cm
  modified_base 17: mod_base = gm
  modified_base 18: mod_base = um
  modified_base 19: mod_base = OTHER; note = 2'-O-methyladenosine with a 3'-phosphorothioate linkage
  modified_base 20: mod_base = OTHER; note = 2'-O-methyladenosine with a 3'-phosphorothioate linkage
  modified_base 21: mod_base = OTHER; note = 2'-O-methyladenosine with a 3'-phosphate substitution
aaagttcaactgcttcgtaaa

SEQ ID NO: 460 - RNA, 23 nt, synthetic construct
  source 1..23: mol_type = other RNA
  modified_base 1: mod_base = OTHER; note = 2'-O-methyluridine with a 3'-phosphorothioate linkage and a 5'-phosphate substitution
  modified_base 2: mod_base = OTHER; note = 2'-fluorouridine with a 3'-phosphorothioate linkage
  modified_base 3: mod_base = um
  modified_base 4: mod_base = OTHER; note = 2'-O-methyladenosine
  modified_base 5: mod_base = cm
  modified_base 6: mod_base = OTHER; note = 2'-fluoroguanosine
  modified_base 7: mod_base = OTHER; note = 2'-O-methyladenosine
  modified_base 8: mod_base = OTHER; note = 2'-O-methyladenosine
  modified_base 9: mod_base = gm
  modified_base 10: mod_base = cm
  modified_base 11: mod_base = OTHER; note = 2'-O-methyladenosine
  modified_base 12: mod_base = gm
  modified_base 13: mod_base = um
  modified_base 14: mod_base = OTHER; note = 2'-fluorouridine
  modified_base 15: mod_base = gm
  modified_base 16: mod_base = OTHER; note = 2'-fluoroadenosine
  modified_base 17: mod_base = OTHER; note = 2'-O-methyladenosine
  modified_base 18: mod_base = cm
  modified_base 19: mod_base = um
  modified_base 20: mod_base = um
  modified_base 21: mod_base = OTHER; note = 2'-O-methyluridine with a 3'-phosphorothioate linkage
  modified_base 22: mod_base = OTHER; note = 2'-O-methylcytidine with a 3'-phosphorothioate linkage
  modified_base 23: mod_base = um
tttacgaagcagttgaactttct

SEQ ID NO: 461 - RNA, 21 nt, synthetic construct
  source 1..21: mol_type = other RNA
  modified_base 1: mod_base = OTHER; note = 2'-O-methyluridine with a 3'-phosphorothioate linkage
  modified_base 2: mod_base = OTHER; note = 2'-O-methylguanosine with a 3'-phosphorothioate linkage
  modified_base 3: mod_base = um
  modified_base 4: mod_base = um
  modified_base 5: mod_base = OTHER; note = 2'-O-methyladenosine
  modified_base 6: mod_base = OTHER; note = 2'-O-methyladenosine
  modified_base 7: mod_base = OTHER; note = 2'-fluorouridine
  modified_base 8: mod_base = gm
  modified_base 9: mod_base = OTHER; note = 2'-fluorocytidine
  modified_base 10: mod_base = OTHER; note = 2'-fluorocytidine
  modified_base 11: mod_base = OTHER; note = 2'-fluorocytidine
  modified_base 12: mod_base = OTHER; note = 2'-O-methyladenosine
  modified_base 13: mod_base = OTHER; note = 2'-O-methyladenosine
  modified_base 14: mod_base = gm
  modified_base 15: mod_base = um
  modified_base 16: mod_base = gm
  modified_base 17: mod_base = OTHER; note = 2'-O-methyladenosine
  modified_base 18: mod_base = cm
  modified_base 19: mod_base = OTHER; note = 2'-O-methyluridine with a 3'-phosphorothioate linkage
  modified_base 20: mod_base = OTHER; note = 2'-O-methylguanosine with a 3'-phosphorothioate linkage
  modified_base 21: mod_base = OTHER; note = 2'-O-methyladenosine with a 3'-phosphate substitution
tgttaatgcccaagtgactga

SEQ ID NO: 462 - RNA, 23 nt, synthetic construct
  source 1..23: mol_type = other RNA
  modified_base 1: mod_base = OTHER; note = 2'-O-methyluridine with a 3'-phosphorothioate linkage and a 5'-phosphate substitution
  modified_base 2: mod_base = OTHER; note = 2'-fluorocytidine with a 3'-phosphorothioate linkage
  modified_base 3: mod_base = OTHER; note = 2'-O-methyladenosine
  modified_base 4: mod_base = gm
  modified_base 5: mod_base = um
  modified_base 6: mod_base = OTHER; note = 2'-fluorocytidine
  modified_base 7: mod_base = OTHER; note = 2'-O-methyladenosine
  modified_base 8: mod_base = cm
  modified_base 9: mod_base = um
  modified_base 10: mod_base = um
  modified_base 11: mod_base = gm
  modified_base 12: mod_base = gm
  modified_base 13: mod_base = gm
  modified_base 14: mod_base = OTHER; note = 2'-fluorocytidine
  modified_base 15: mod_base = OTHER; note = 2'-O-methyladenosine
  modified_base 16: mod_base = OTHER; note = 2'-fluorouridine
  modified_base 17: mod_base = um
  modified_base 18: mod_base = OTHER; note = 2'-O-methyladenosine
  modified_base 19: mod_base = OTHER; note = 2'-O-methyladenosine
  modified_base 20: mod_base = cm
  modified_base 21: mod_base = OTHER; note = 2'-O-methyladenosine with a 3'-phosphorothioate linkage
  modified_base 22: mod_base = OTHER; note = 2'-O-methylcytidine with a 3'-phosphorothioate linkage
  modified_base 23: mod_base = um
tcagtcacttgggcattaacact

SEQ ID NO: 463 - RNA, 21 nt, synthetic construct
  source 1..21: mol_type = other RNA
  modified_base 1: mod_base = OTHER; note = 2'-O-methylguanosine with a 3'-phosphorothioate linkage
  modified_base 2: mod_base = OTHER; note = 2'-O-methyladenosine with a 3'-phosphorothioate linkage
  modified_base 3: mod_base = um
  modified_base 4: mod_base = gm
  modified_base 5: mod_base = um
  modified_base 6: mod_base = um
  modified_base 7: mod_base = OTHER; note = 2'-fluoroguanosine
  modified_base 8: mod_base = OTHER; note = 2'-O-methyladenosine
  modified_base 9: mod_base = OTHER; note = 2'-fluorocytidine
  modified_base 10: mod_base = OTHER; note = 2'-fluorouridine
  modified_base 11: mod_base = OTHER; note = 2'-fluorouridine
  modified_base 12: mod_base = gm
  modified_base 13: mod_base = OTHER; note = 2'-O-methyladenosine
  modified_base 14: mod_base = gm
  modified_base 15: mod_base = um
  modified_base 16: mod_base = OTHER; note = 2'-O-methyladenosine
  modified_base 17: mod_base = OTHER; note = 2'-O-methyladenosine
  modified_base 18: mod_base = OTHER; note = 2'-O-methyladenosine
  modified_base 19: mod_base = OTHER; note = 2'-O-methyluridine with a 3'-phosphorothioate linkage
  modified_base 20: mod_base = OTHER; note = 2'-O-methyladenosine with a 3'-phosphorothioate linkage
  modified_base 21: mod_base = OTHER; note = 2'-O-methyladenosine with a 3'-phosphate substitution
gatgttgacttgagtaaataa

SEQ ID NO: 464 - RNA, 23 nt, synthetic construct
  source 1..23: mol_type = other RNA
  modified_base 1: mod_base = OTHER; note = 2'-O-methyluridine with a 3'-phosphorothioate linkage and a 5'-phosphate substitution
  modified_base 2: mod_base = OTHER; note = 2'-fluorouridine with a 3'-phosphorothioate linkage
  modified_base 3: mod_base = OTHER; note = 2'-O-methyladenosine
  modified_base 4: mod_base = um
  modified_base 5: mod_base = um
  modified_base 6: mod_base = OTHER; note = 2'-fluorouridine
  modified_base 7: mod_base = OTHER; note = 2'-O-methyladenosine
  modified_base 8: mod_base = cm
  modified_base 9: mod_base = um
  modified_base 10: mod_base = cm
  modified_base 11: mod_base = OTHER; note = 2'-O-methyladenosine
  modified_base 12: mod_base = OTHER; note = 2'-O-methyladenosine
  modified_base 13: mod_base = gm
  modified_base 14: mod_base = OTHER; note = 2'-fluorouridine
  modified_base 15: mod_base = cm
  modified_base 16: mod_base = OTHER; note = 2'-fluoroadenosine
  modified_base 17: mod_base = OTHER; note = 2'-O-methyladenosine
  modified_base 18: mod_base = cm
  modified_base 19: mod_base = OTHER; note = 2'-O-methyladenosine
  modified_base 20: mod_base = um
  modified_base 21: mod_base = OTHER; note = 2'-O-methylcytidine with a 3'-phosphorothioate linkage
  modified_base 22: mod_base = OTHER; note = 2'-O-methyladenosine with a 3'-phosphorothioate linkage
  modified_base 23: mod_base = gm
ttatttactcaagtcaacatcag

SEQ ID NO: 465 - RNA, 21 nt, synthetic construct
  source 1..21: mol_type = other RNA
  modified_base 1: mod_base = OTHER; note = 2'-O-methylguanosine with a 3'-phosphorothioate linkage
  modified_base 2: mod_base = OTHER; note = 2'-O-methyladenosine with a 3'-phosphorothioate linkage
  modified_base 3: mod_base = OTHER; note = 2'-O-methyladenosine
  modified_base 4: mod_base = gm
  modified_base 5: mod_base = cm
  modified_base 6: mod_base = cm
  modified_base 7: mod_base = OTHER; note = 2'-fluoroadenosine
  modified_base 8: mod_base = OTHER; note = 2'-O-methyladenosine
  modified_base 9: mod_base = OTHER; note = 2'-fluoroadenosine
  modified_base 10: mod_base = OTHER; note = 2'-fluoroadenosine
  modified_base 11: mod_base = OTHER; note = 2'-fluorouridine
  modified_base 12: mod_base = OTHER; note = 2'-O-methyladenosine
  modified_base 13: mod_base = gm
  modified_base 14: mod_base = OTHER; note = 2'-O-methyladenosine
  modified_base 15: mod_base = um
  modified_base 16: mod_base = gm
  modified_base 17: mod_base = OTHER; note = 2'-O-methyladenosine
  modified_base 18: mod_base = gm
  modified_base 19: mod_base = OTHER; note = 2'-O-methyladenosine with a 3'-phosphorothioate linkage
  modified_base 20: mod_base = OTHER; note = 2'-O-methyluridine with a 3'-phosphorothioate linkage
  modified_base 21: mod_base = OTHER; note = 2'-O-methyladenosine with a 3'-phosphate substitution
gaagccaaaatagatgagata

SEQ ID NO: 466 - RNA, 23 nt, synthetic construct
  source 1..23: mol_type = other RNA
  modified_base 1: mod_base = OTHER; note = 2'-O-methyluridine with a 3'-phosphorothioate linkage and a 5'-phosphate substitution
  modified_base 2: mod_base = OTHER; note = 2'-fluoroadenosine with a 3'-phosphorothioate linkage
  modified_base 3: mod_base = um
  modified_base 4: mod_base = cm
  modified_base 5: mod_base = um
  modified_base 6: mod_base = OTHER; note = 2'-fluorocytidine
  modified_base 7: mod_base = OTHER; note = 2'-O-methyladenosine
  modified_base 8: mod_base = um
  modified_base 9: mod_base = cm
  modified_base 10: mod_base = um
  modified_base 11: mod_base = OTHER; note = 2'-O-methyladenosine
  modified_base 12: mod_base = um
  modified_base 13: mod_base = um
  modified_base 14: mod_base = OTHER; note = 2'-fluorouridine
  modified_base 15: mod_base = um
  modified_base 16: mod_base = OTHER; note = 2'-fluoroguanosine
  modified_base 17: mod_base = gm
  modified_base 18: mod_base = cm
  modified_base 19: mod_base = um
  modified_base 20: mod_base = um
  modified_base 21: mod_base = OTHER; note = 2'-O-methylcytidine with a 3'-phosphorothioate linkage
  modified_base 22: mod_base = OTHER; note = 2'-O-methyladenosine with a 3'-phosphorothioate linkage
  modified_base 23: mod_base = um
tatctcatctattttggcttcat

SEQ ID NO: 467 - RNA, 21 nt, synthetic construct
  source 1..21: mol_type = other RNA
  modified_base 1: mod_base = OTHER; note = 2'-O-methylguanosine with a 3'-phosphorothioate linkage
  modified_base 2: mod_base = OTHER; note = 2'-O-methyluridine with a 3'-phosphorothioate linkage
  modified_base 3: mod_base = um
  modified_base 4: mod_base = cm
  modified_base 5: mod_base = OTHER; note = 2'-O-methyladenosine
  modified_base 6: mod_base = OTHER; note = 2'-O-methyladenosine
  modified_base 7: mod_base = OTHER; note = 2'-fluorocytidine
  modified_base 8: mod_base = um
  modified_base 9: mod_base = OTHER; note = 2'-fluoroguanosine
  modified_base 10: mod_base = OTHER; note = 2'-fluorocytidine
  modified_base 11: mod_base = OTHER; note = 2'-fluorouridine
  modified_base 12: mod_base = um
  modified_base 13: mod_base = cm
  modified_base 14: mod_base = gm
  modified_base 15: mod_base = um
  modified_base 16: mod_base = OTHER; note = 2'-O-methyladenosine
  modified_base 17: mod_base = OTHER; note = 2'-O-methyladenosine
  modified_base 18: mod_base = um
  modified_base 19: mod_base = OTHER; note = 2'-O-methyluridine with a 3'-phosphorothioate linkage
  modified_base 20: mod_base = OTHER; note = 2'-O-methylguanosine with a 3'-phosphorothioate linkage
  modified_base 21: mod_base = OTHER; note = 2'-O-methyladenosine with a 3'-phosphate substitution
gttcaactgcttcgtaattga

SEQ ID NO: 468 - RNA, 23 nt, synthetic construct
  source 1..23: mol_type = other RNA
  modified_base 1: mod_base = OTHER; note = 2'-O-methyluridine with a 3'-phosphorothioate linkage and a 5'-phosphate substitution
  modified_base 2: mod_base = OTHER; note = 2'-fluorocytidine with a 3'-phosphorothioate linkage
  modified_base 3: mod_base = OTHER; note = 2'-O-methyladenosine
  modified_base 4: mod_base = OTHER; note = 2'-O-methyladenosine
  modified_base 5: mod_base = um
  modified_base 6: mod_base = OTHER; note = 2'-fluorouridine
  modified_base 7: mod_base = OTHER; note = 2'-O-methyladenosine
  modified_base 8: mod_base = cm
  modified_base 9: mod_base = gm
  modified_base 10: mod_base = OTHER; note = 2'-O-methyladenosine
  modified_base 11: mod_base = OTHER; note = 2'-O-methyladenosine
  modified_base 12: mod_base = gm
  modified_base 13: mod_base = cm
  modified_base 14: mod_base = OTHER; note = 2'-fluoroadenosine
  modified_base 15: mod_base = gm
  modified_base 16: mod_base = OTHER; note = 2'-fluorouridine
  modified_base 17: mod_base = um
  modified_base 18: mod_base = gm
  modified_base 19: mod_base = OTHER; note = 2'-O-methyladenosine
  modified_base 20: mod_base = OTHER; note = 2'-O-methyladenosine
  modified_base 21: mod_base = OTHER; note = 2'-O-methylcytidine with a 3'-phosphorothioate linkage
  modified_base 22: mod_base = OTHER; note = 2'-O-methyluridine with a 3'-phosphorothioate linkage
  modified_base 23: mod_base = um
tcaattacgaagcagttgaactt

SEQ ID NO: 469 - RNA, 21 nt, synthetic construct
  source 1..21: mol_type = other RNA
  modified_base 1: mod_base = OTHER; note = 2'-O-methylguanosine with a 3'-phosphorothioate linkage
  modified_base 2: mod_base = OTHER; note = 2'-O-methyluridine with a 3'-phosphorothioate linkage
  modified_base 3: mod_base = OTHER; note = 2'-O-methyladenosine
  modified_base 4: mod_base = cm
  modified_base 5: mod_base = um
  modified_base 6: mod_base = cm
  modified_base 7: mod_base = OTHER; note = 2'-fluorouridine
  modified_base 8: mod_base = um
  modified_base 9: mod_base = OTHER; note = 2'-fluoroguanosine
  modified_base 10: mod_base = OTHER; note = 2'-fluorocytidine
  modified_base 11: mod_base = OTHER; note = 2'-fluoroadenosine
  modified_base 12: mod_base = gm
  modified_base 13: mod_base = OTHER; note = 2'-O-methyladenosine
  modified_base 14: mod_base = gm
  modified_base 15: mod_base = OTHER; note = 2'-O-methyladenosine
  modified_base 16: mod_base = OTHER; note = 2'-O-methyladenosine
  modified_base 17: mod_base = OTHER; note = 2'-O-methyladenosine
  modified_base 18: mod_base = OTHER; note = 2'-O-methyladenosine
  modified_base 19: mod_base = OTHER; note = 2'-O-methyluridine with a 3'-phosphorothioate linkage
  modified_base 20: mod_base = OTHER; note = 2'-O-methyluridine with a 3'-phosphorothioate linkage
  modified_base 21: mod_base = OTHER; note = 2'-O-methyladenosine with a 3'-phosphate substitution
gtactcttgcagagaaaatta

SEQ ID NO: 470 - RNA, 23 nt, synthetic construct
  source 1..23: mol_type = other RNA
  modified_base 1: mod_base = OTHER; note = 2'-O-methyluridine with a 3'-phosphorothioate linkage and a 5'-phosphate substitution
  modified_base 2: mod_base = OTHER; note = 2'-fluoroadenosine with a 3'-phosphorothioate linkage
  modified_base 3: mod_base = OTHER; note = 2'-O-methyladenosine
  modified_base 4: mod_base = um
  modified_base 5: mod_base = um
  modified_base 6: mod_base = OTHER; note = 2'-fluorouridine
  modified_base 7: mod_base = um
  modified_base 8: mod_base = cm
  modified_base 9: mod_base = um
  modified_base 10: mod_base = cm
  modified_base 11: mod_base = um
  modified_base 12: mod_base = gm
  modified_base 13: mod_base = cm
  modified_base 14: mod_base = OTHER; note = 2'-fluoroadenosine
  modified_base 15: mod_base = OTHER; note = 2'-O-methyladenosine
  modified_base 16: mod_base = OTHER; note = 2'-fluoroguanosine
  modified_base 17: mod_base = OTHER; note = 2'-O-methyladenosine
  modified_base 18: mod_base = gm
  modified_base 19: mod_base = um
  modified_base 20: mod_base = OTHER; note = 2'-O-methyladenosine
  modified_base 21: mod_base = OTHER; note = 2'-O-methylcytidine with a 3'-phosphorothioate linkage
  modified_base 22: mod_base = OTHER; note = 2'-O-methyladenosine with a 3'-phosphorothioate linkage
  modified_base 23: mod_base = OTHER; note = 2'-O-methyladenosine
taattttctctgcaagagtacaa

SEQ ID NO: 471 - RNA, 21 nt, synthetic construct
  source 1..21: mol_type = other RNA
  modified_base 1: mod_base = OTHER; note = 2'-O-methylcytidine with a 3'-phosphorothioate linkage
  modified_base 2: mod_base = OTHER; note = 2'-O-methyluridine with a 3'-phosphorothioate linkage
  modified_base 3: mod_base = cm
  modified_base 4: mod_base = OTHER; note = 2'-O-methyladenosine
  modified_base 5: mod_base = OTHER; note = 2'-O-methyladenosine
  modified_base 6: mod_base = gm
  modified_base 7: mod_base = OTHER; note = 2'-fluoroguanosine
  modified_base 8: mod_base = OTHER; note = 2'-O-methyladenosine
  modified_base 9: mod_base = OTHER; note = 2'-fluorocytidine
  modified_base 10: mod_base = OTHER; note = 2'-fluoroadenosine
  modified_base 11: mod_base = OTHER; note = 2'-fluorouridine
  modified_base 12: mod_base = um
  modified_base 13: mod_base = OTHER; note = 2'-O-methyladenosine
  modified_base 14: mod_base = cm
  modified_base 15: mod_base = um
  modified_base 16: mod_base = OTHER; note = 2'-O-methyladenosine
  modified_base 17: mod_base = gm
  modified_base 18: mod_base = um
  modified_base 19: mod_base = OTHER; note = 2'-O-methylguanosine with a 3'-phosphorothioate linkage
  modified_base 20: mod_base = OTHER; note = 2'-O-methyladenosine with a 3'-phosphorothioate linkage
  modified_base 21: mod_base = OTHER; note = 2'-O-methyladenosine with a 3'-phosphate substitution
ctcaaggacattactagtgaa

SEQ ID NO: 472 - RNA, 23 nt, synthetic construct
  source 1..23: mol_type = other RNA
  modified_base 1: mod_base = OTHER; note = 2'-O-methyluridine with a 3'-phosphorothioate linkage and a 5'-phosphate substitution
  modified_base 2: mod_base = OTHER; note = 2'-fluorouridine with a 3'-phosphorothioate linkage
  modified_base 3: mod_base = cm
  modified_base 4: mod_base = OTHER; note = 2'-O-methyladenosine
  modified_base 5: mod_base = cm
  modified_base 6: mod_base = OTHER; note = 2'-fluorouridine
  modified_base 7: mod_base = OTHER; note = 2'-O-methyladenosine
  modified_base 8: mod_base = gm
  modified_base 9: mod_base = um
  modified_base 10: mod_base = OTHER; note = 2'-O-methyladenosine
  modified_base 11: mod_base = OTHER; note = 2'-O-methyladenosine
  modified_base 12: mod_base = um
  modified_base 13: mod_base = gm
  modified_base 14: mod_base = OTHER; note = 2'-fluorouridine
  modified_base 15: mod_base = cm
  modified_base 16: mod_base = OTHER; note = 2'-fluorocytidine
  modified_base 17: mod_base = um
  modified_base 18: mod_base = um
  modified_base 19: mod_base = gm
  modified_base 20: mod_base = OTHER; note = 2'-O-methyladenosine
  modified_base 21: mod_base = OTHER; note = 2'-O-methylguanosine with a 3'-phosphorothioate linkage
  modified_base 22: mod_base = OTHER; note = 2'-O-methylguanosine with a 3'-phosphorothioate linkage
  modified_base 23: mod_base = OTHER; note = 2'-O-methyladenosine
ttcactagtaatgtccttgagga

SEQ ID NO: 473 - RNA, 21 nt, synthetic construct
  source 1..21: mol_type = other RNA
  modified_base 1: mod_base = OTHER; note = 2'-O-methyladenosine with a 3'-phosphorothioate linkage
  modified_base 2: mod_base = OTHER; note = 2'-O-methylguanosine with a 3'-phosphorothioate linkage
  modified_base 3: mod_base = gm
  modified_base 4: mod_base = gm
  modified_base 5: mod_base = OTHER; note = 2'-O-methyladenosine
  modified_base 6: mod_base = OTHER; note = 2'-O-methyladenosine
  modified_base 7: mod_base = OTHER; note = 2'-fluoroguanosine
  modified_base 8: mod_base = gm
  modified_base 9: mod_base = OTHER; note = 2'-fluoroadenosine
  modified_base 10: mod_base = OTHER; note = 2'-fluoroguanosine
  modified_base 11: mod_base = OTHER; note = 2'-fluorouridine
  modified_base 12: mod_base = OTHER; note = 2'-O-methyladenosine
  modified_base 13: mod_base = cm
  modified_base 14: mod_base = OTHER; note = 2'-O-methyladenosine
  modified_base 15: mod_base = cm
  modified_base 16: mod_base = OTHER; note = 2'-O-methyladenosine
  modified_base 17: mod_base = gm
  modified_base 18: mod_base = OTHER; note = 2'-O-methyladenosine
  modified_base 19: mod_base = OTHER; note = 2'-O-methylcytidine with a 3'-phosphorothioate linkage
  modified_base 20: mod_base = OTHER; note = 2'-O-methyladenosine with a 3'-phosphorothioate linkage
  modified_base 21: mod_base = OTHER; note = 2'-O-methyladenosine with a 3'-phosphate substitution
agggaaggagtacacagacaa

SEQ ID NO: 474 - RNA, 23 nt, synthetic construct
  source 1..23: mol_type = other RNA
  modified_base 1: mod_base = OTHER; note = 2'-O-methyluridine with a 3'-phosphorothioate linkage and a 5'-phosphate substitution
  modified_base 2: mod_base = OTHER; note = 2'-fluorouridine with a 3'-phosphorothioate linkage
  modified_base 3: mod_base = gm
  modified_base 4: mod_base = um
  modified_base 5: mod_base = cm
  modified_base 6: mod_base = OTHER; note = 2'-fluorouridine
  modified_base 7: mod_base = gm
  modified_base 8: mod_base = um
  modified_base 9: mod_base = gm
  modified_base 10: mod_base = um
  modified_base 11: mod_base = OTHER; note = 2'-O-methyladenosine
  modified_base 12: mod_base = cm
  modified_base 13: mod_base = um
  modified_base 14: mod_base = OTHER; note = 2'-fluorocytidine
  modified_base 15: mod_base = cm
  modified_base 16: mod_base = OTHER; note = 2'-fluorouridine
  modified_base 17: mod_base = um
  modified_base 18: mod_base = cm
  modified_base 19: mod_base = cm
  modified_base 20: mod_base = cm
  modified_base 21: mod_base = OTHER; note = 2'-O-methyluridine with a 3'-phosphorothioate linkage
  modified_base 22: mod_base = OTHER; note = 2'-O-methyluridine with a 3'-phosphorothioate linkage
  modified_base 23: mod_base = cm
ttgtctgtgtactccttcccttc

SEQ ID NO: 475 - RNA, 21 nt, synthetic construct
  source 1..21: mol_type = other RNA
  modified_base 1: mod_base = OTHER; note = 2'-O-methyluridine with a 3'-phosphorothioate linkage
  modified_base 2: mod_base = OTHER; note = 2'-O-methylcytidine with a 3'-phosphorothioate linkage
  modified_base 3: mod_base = OTHER; note = 2'-O-methyladenosine
  modified_base 4: mod_base = um
  modified_base 5: mod_base = gm
  modified_base 6: mod_base = OTHER; note = 2'-O-methyladenosine
  modified_base 7: mod_base = OTHER; note = 2'-fluorocytidine
  modified_base 8: mod_base = OTHER; note = 2'-O-methyladenosine
  modified_base 9: mod_base = OTHER; note = 2'-fluorocytidine
  modified_base 10: mod_base = OTHER; note = 2'-fluorouridine
  modified_base 11: mod_base = OTHER; note = 2'-fluoroadenosine
  modified_base 12: mod_base = OTHER; note = 2'-O-methyladenosine
  modified_base 13: mod_base = gm
  modified_base 14: mod_base = um
  modified_base 15: mod_base = cm
  modified_base 16: mod_base = OTHER; note = 2'-O-methyladenosine
  modified_base 17: mod_base = OTHER; note = 2'-O-methyladenosine
  modified_base 18: mod_base = gm
  modified_base 19: mod_base = OTHER; note = 2'-O-methyluridine with a 3'-phosphorothioate linkage
  modified_base 20: mod_base = OTHER; note = 2'-O-methyluridine with a 3'-phosphorothioate linkage
  modified_base 21: mod_base = OTHER; note = 2'-O-methyladenosine with a 3'-phosphate substitution
tcatgacactaagtcaagtta

SEQ ID NO: 476 - RNA, 23 nt, synthetic construct
  source 1..23: mol_type = other RNA
  modified_base 1: mod_base = OTHER; note = 2'-O-methyluridine with a 3'-phosphorothioate linkage and a 5'-phosphate substitution
  modified_base 2: mod_base = OTHER; note = 2'-fluoroadenosine with a 3'-phosphorothioate linkage
  modified_base 3: mod_base = OTHER; note = 2'-O-methyladenosine
  modified_base 4: mod_base = cm
  modified_base 5: mod_base = um
  modified_base 6: mod_base = OTHER; note = 2'-fluorouridine
  modified_base 7: mod_base = gm
  modified_base 8: mod_base = OTHER; note = 2'-O-methyladenosine
  modified_base 9: mod_base = cm
  modified_base 10: mod_base = um
  modified_base 11: mod_base = um
  modified_base 12: mod_base = OTHER; note = 2'-O-methyladenosine
  modified_base 13: mod_base = gm
  modified_base 14: mod_base = OTHER; note = 2'-fluorouridine
  modified_base 15: mod_base = gm
  modified_base 16: mod_base = OTHER; note = 2'-fluorouridine
  modified_base 17: mod_base = cm
  modified_base 18: mod_base = OTHER; note = 2'-O-methyladenosine
  modified_base 19: mod_base = um
  modified_base 20: mod_base = gm
  modified_base 21: mod_base = OTHER; note = 2'-O-methyladenosine with a 3'-phosphorothioate linkage
  modified_base 22: mod_base = OTHER; note = 2'-O-methylcytidine with a 3'-phosphorothioate linkage
  modified_base 23: mod_base = um
taacttgacttagtgtcatgact

SEQ ID NO: 477 - RNA, 21 nt, synthetic construct
  source 1..21: mol_type = other RNA
  modified_base 1: mod_base = OTHER; note = 2'-O-methylcytidine with a 3'-phosphorothioate linkage
  modified_base 2: mod_base = OTHER; note = 2'-O-methylcytidine with a 3'-phosphorothioate linkage
  modified_base 3: mod_base = um
  modified_base 4: mod_base = cm
  modified_base 5: mod_base = OTHER; note = 2'-O-methyladenosine
  modified_base 6: mod_base = OTHER; note = 2'-O-methyladenosine
  modified_base 7: mod_base = OTHER; note = 2'-fluoroguanosine
  modified_base 8: mod_base = gm
  modified_base 9: mod_base = OTHER; note = 2'-fluoroadenosine
  modified_base 10: mod_base = OTHER; note = 2'-fluorocytidine
  modified_base 11: mod_base = OTHER; note = 2'-fluoroadenosine
  modified_base 12: mod_base = um
  modified_base 13: mod_base = um
  modified_base 14: mod_base = OTHER; note = 2'-O-methyladenosine
  modified_base 15: mod_base = cm
  modified_base 16: mod_base = um
  modified_base 17: mod_base = OTHER; note = 2'-O-methyladenosine
  modified_base 18: mod_base = gm
  modified_base 19: mod_base = OTHER; note = 2'-O-methyluridine with a 3'-phosphorothioate linkage
  modified_base 20: mod_base = OTHER; note = 2'-O-methylguanosine with a 3'-phosphorothioate linkage
  modified_base 21: mod_base = OTHER; note = 2'-O-methyladenosine with a 3'-phosphate substitution
cctcaaggacattactagtga

SEQ ID NO: 478 - RNA, 23 nt, synthetic construct
  source 1..23: mol_type = other RNA
  modified_base 1: mod_base = OTHER; note = 2'-O-methyluridine with a 3'-phosphorothioate linkage and a 5'-phosphate substitution
  modified_base 2: mod_base = OTHER; note = 2'-fluorocytidine with a 3'-phosphorothioate linkage
  modified_base 3: mod_base = OTHER; note = 2'-O-methyladenosine
  modified_base 4: mod_base = cm
  modified_base 5: mod_base = um
  modified_base 6: mod_base = OTHER; note = 2'-fluoroadenosine
  modified_base 7: mod_base = gm
  modified_base 8: mod_base = um
  modified_base 9: mod_base = OTHER; note = 2'-O-methyladenosine
  modified_base 10: mod_base = OTHER; note = 2'-O-methyladenosine
  modified_base 11: mod_base = um
  modified_base 12: mod_base = gm
  modified_base 13: mod_base = um
  modified_base 14: mod_base = OTHER; note = 2'-fluorocytidine
  modified_base 15: mod_base = cm
  modified_base 16: mod_base = OTHER; note = 2'-fluorouridine
  modified_base 17: mod_base = um
  modified_base 18: mod_base = gm
  modified_base 19: mod_base = OTHER; note = 2'-O-methyladenosine
  modified_base 20: mod_base = gm
  modified_base 21: mod_base = OTHER; note = 2'-O-methylguanosine with a 3'-phosphorothioate linkage
  modified_base 22: mod_base = OTHER; note = 2'-O-methyladenosine with a 3'-phosphorothioate linkage
  modified_base 23: mod_base = um
tcactagtaatgtccttgaggat

SEQ ID NO: 479 - RNA, 21 nt, synthetic construct
  source 1..21: mol_type = other RNA
  modified_base 1: mod_base = OTHER; note = 2'-O-methylguanosine with a 3'-phosphorothioate linkage
  modified_base 2: mod_base = OTHER; note = 2'-O-methylguanosine with a 3'-phosphorothioate linkage
  modified_base 3: mod_base = cm
  modified_base 4: mod_base = um
  modified_base 5: mod_base = um
  modified_base 6: mod_base = um
  modified_base 7: mod_base = OTHER; note = 2'-fluoroguanosine
  modified_base 8: mod_base = um
  modified_base 9: mod_base = OTHER; note = 2'-fluorouridine
  modified_base 10: mod_base = OTHER; note = 2'-fluorocytidine
  modified_base 11: mod_base = OTHER; note = 2'-fluoroguanosine
  modified_base 12: mod_base = OTHER; note = 2'-O-methyladenosine
  modified_base 13: mod_base = OTHER; note = 2'-O-methyladenosine
  modified_base 14: mod_base = OTHER; note = 2'-O-methyladenosine
  modified_base 15: mod_base = gm
  modified_base 16: mod_base = OTHER; note = 2'-O-methyladenosine
  modified_base 17: mod_base = OTHER; note = 2'-O-methyladenosine
  modified_base 18: mod_base = um
  modified_base 19: mod_base = OTHER; note = 2'-O-methylguanosine with a 3'-phosphorothioate linkage
  modified_base 20: mod_base = OTHER; note = 2'-O-methylguanosine with a 3'-phosphorothioate linkage
  modified_base 21: mod_base = OTHER; note = 2'-O-methyladenosine with a 3'-phosphate substitution
ggctttgttcgaaagaatgga

SEQ ID NO: 480 - RNA, 23 nt, synthetic construct
  source 1..23: mol_type = other RNA
  modified_base 1: mod_base = OTHER; note = 2'-O-methyluridine with a 3'-phosphorothioate linkage and a 5'-phosphate substitution
  modified_base 2: mod_base = OTHER; note = 2'-fluorocytidine with a 3'-phosphorothioate linkage
  modified_base 3: mod_base = cm
  modified_base 4: mod_base = OTHER; note = 2'-O-methyladenosine
  modified_base 5: mod_base = um
  modified_base 6: mod_base = OTHER; note = 2'-fluorouridine
  modified_base 7: mod_base = cm
  modified_base 8: mod_base = um
  modified_base 9: mod_base = um
  modified_base 10: mod_base = um
  modified_base 11: mod_base = cm
  modified_base 12: mod_base = gm
  modified_base 13: mod_base = OTHER; note = 2'-O-methyladenosine
  modified_base 14: mod_base = OTHER; note = 2'-fluoroadenosine
  modified_base 15: mod_base = cm
  modified_base 16: mod_base = OTHER; note = 2'-fluoroadenosine
  modified_base 17: mod_base = OTHER; note = 2'-O-methyladenosine
  modified_base 18: mod_base = OTHER; note = 2'-O-methyladenosine
  modified_base 19: mod_base = gm
  modified_base 20: mod_base = cm
  modified_base 21: mod_base = OTHER; note = 2'-O-methylcytidine with a 3'-phosphorothioate linkage
  modified_base 22: mod_base = OTHER; note = 2'-O-methyluridine with a 3'-phosphorothioate linkage
  modified_base 23: mod_base = um
tccattctttcgaacaaagcctt

SEQ ID NO: 481 - RNA, 21 nt, synthetic construct
  source 1..21: mol_type = other RNA
  modified_base 1: mod_base = OTHER; note = 2'-O-methylcytidine with a 3'-phosphorothioate linkage
  modified_base 2: mod_base = OTHER; note = 2'-O-methylcytidine with a 3'-phosphorothioate linkage
  modified_base 3: mod_base = OTHER; note = 2'-O-methyladenosine
  modified_base 4: mod_base = gm
  modified_base 5: mod_base = OTHER; note = 2'-O-methyladenosine
  modified_base 6: mod_base = cm
  modified_base 7: mod_base = OTHER; note = 2'-fluorouridine
  modified_base 8: mod_base = gm
  modified_base 9: mod_base = OTHER; note = 2'-fluorocytidine
  modified_base 10: mod_base = OTHER; note = 2'-fluoroguanosine
  modified_base 11: mod_base = OTHER; note = 2'-fluorouridine
  modified_base 12: mod_base = gm
  modified_base 13: mod_base = cm
  modified_base 14: mod_base = cm
  modified_base 15: mod_base = cm
  modified_base 16: mod_base = um
  modified_base 17: mod_base = gm
  modified_base 18: mod_base = cm
  modified_base 19: mod_base = OTHER; note = 2'-O-methylcytidine with a 3'-phosphorothioate linkage
  modified_base 20: mod_base = OTHER; note = 2'-O-methyladenosine with a 3'-phosphorothioate linkage
  modified_base 21: mod_base = OTHER; note = 2'-O-methyladenosine with a 3'-phosphate substitution
ccagactgcgtgccctgccaa

SEQ ID NO: 482 - RNA, 23 nt, synthetic construct
  source 1..23: mol_type = other RNA
  modified_base 1: mod_base = OTHER; note = 2'-O-methyluridine with a 3'-phosphorothioate linkage and a 5'-phosphate substitution
  modified_base 2: mod_base = OTHER; note = 2'-fluorouridine with a 3'-phosphorothioate linkage
  modified_base 3: mod_base = gm
  modified_base 4: mod_base = gm
  modified_base 5: mod_base = cm
  modified_base 6: mod_base = OTHER; note = 2'-fluoroadenosine
  modified_base 7: mod_base = gm
  modified_base 8: mod_base = gm
  modified_base 9: mod_base = gm
  modified_base 10: mod_base = cm
  modified_base 11: mod_base = OTHER; note = 2'-O-methyladenosine
  modified_base 12: mod_base = cm
  modified_base 13: mod_base = gm
  modified_base 14: mod_base = OTHER; note = 2'-fluorocytidine
  modified_base 15: mod_base = OTHER; note = 2'-O-methyladenosine
  modified_base 16: mod_base = OTHER; note = 2'-fluoroguanosine
  modified_base 17: mod_base = um
  modified_base 18: mod_base = cm
  modified_base 19: mod_base = um
  modified_base 20: mod_base = gm
  modified_base 21: mod_base = OTHER; note = 2'-O-methylguanosine with a 3'-phosphorothioate linkage
  modified_base 22: mod_base = OTHER; note = 2'-O-methyluridine with a 3'-phosphorothioate linkage
  modified_base 23: mod_base = um
ttggcagggcacgcagtctggtt

SEQ ID NO: 483 - RNA, 21 nt, synthetic construct
  source 1..21: mol_type = other RNA
  modified_base 1: mod_base = OTHER; note = 2'-O-methyladenosine with a 3'-phosphorothioate linkage
  modified_base 2: mod_base = OTHER; note = 2'-O-methylguanosine with a 3'-phosphorothioate linkage
  modified_base 3: mod_base = cm
  modified_base 4: mod_base = cm
  modified_base 5: mod_base = OTHER; note = 2'-O-methyladenosine
  modified_base 6: mod_base = OTHER; note = 2'-O-methyladenosine
  modified_base 7: mod_base = OTHER; note = 2'-fluoroadenosine
  modified_base 8: mod_base = OTHER; note = 2'-O-methyladenosine
  modified_base 9: mod_base = OTHER; note = 2'-fluorouridine
  modified_base 10: mod_base = OTHER; note = 2'-fluoroadenosine
  modified_base 11: mod_base = OTHER; note = 2'-fluoroguanosine
  modified_base 12: mod_base = OTHER; note = 2'-O-methyladenosine
  modified_base 13: mod_base = um
  modified_base 14: mod_base = gm
  modified_base 15: mod_base = OTHER; note = 2'-O-methyladenosine
  modified_base 16: mod_base = gm
  modified_base 17: mod_base = OTHER; note = 2'-O-methyladenosine
  modified_base 18: mod_base = um
  modified_base 19: mod_base = OTHER; note = 2'-O-methylcytidine with a 3'-phosphorothioate linkage
  modified_base 20: mod_base = OTHER; note = 2'-O-methyladenosine with a 3'-phosphorothioate linkage
  modified_base 21: mod_base = OTHER; note = 2'-O-methyladenosine with a 3'-phosphate substitution
agccaaaatagatgagatcaa

SEQ ID NO: 484 - RNA, 23 nt, synthetic construct
  source 1..23: mol_type = other RNA
  modified_base 1: mod_base = OTHER; note = 2'-O-methyluridine with a 3'-phosphorothioate linkage and a 5'-phosphate substitution
  modified_base 2: mod_base = OTHER; note = 2'-fluorouridine with a 3'-phosphorothioate linkage
  modified_base 3: mod_base = gm
  modified_base 4: mod_base = OTHER; note = 2'-O-methyladenosine
  modified_base 5: mod_base = um
  modified_base 6: mod_base = OTHER; note = 2'-fluorocytidine
  modified_base 7: mod_base = um
  modified_base 8: mod_base = cm
  modified_base 9: mod_base = OTHER; note = 2'-O-methyladenosine
  modified_base 10: mod_base = um
  modified_base 11: mod_base = cm
  modified_base 12: mod_base = um
  modified_base 13: mod_base = OTHER; note = 2'-O-methyladenosine
  modified_base 14: mod_base = OTHER; note = 2'-fluorouridine
  modified_base 15: mod_base = um
  modified_base 16: mod_base = OTHER; note = 2'-fluorouridine
  modified_base 17: mod_base = um
  modified_base 18: mod_base = gm
  modified_base 19: mod_base = gm
  modified_base 20: mod_base = cm
  modified_base 21: mod_base = OTHER; note = 2'-O-methyluridine with a 3'-phosphorothioate linkage
  modified_base 22: mod_base = OTHER; note = 2'-O-methyluridine with a 3'-phosphorothioate linkage
  modified_base 23: mod_base = cm
ttgatctcatctattttggcttc

SEQ ID NO: 485 - RNA, 21 nt, synthetic construct
  source 1..21: mol_type = other RNA
  modified_base 1: mod_base = OTHER; note = 2'-O-methyladenosine with a 3'-phosphorothioate linkage
  modified_base 2: mod_base = OTHER; note = 2'-O-methylguanosine with a 3'-phosphorothioate linkage
  modified_base 3: mod_base = OTHER; note = 2'-O-methyladenosine
  modified_base 4: mod_base = OTHER; note = 2'-O-methyladenosine
  modified_base 5: mod_base = gm
  modified_base 6: mod_base = gm
  modified_base 7: mod_base = OTHER; note = 2'-fluoroguanosine
  modified_base 8: mod_base = OTHER; note = 2'-O-methyladenosine
  modified_base 9: mod_base = OTHER; note = 2'-fluoroadenosine
  modified_base 10: mod_base = OTHER; note = 2'-fluoroguanosine
  modified_base 11: mod_base = OTHER; note = 2'-fluoroguanosine
  modified_base 12: mod_base = OTHER; note = 2'-O-methyladenosine
  modified_base 13: mod_base = gm
  modified_base 14: mod_base = um
  modified_base 15: mod_base = OTHER; note = 2'-O-methyladenosine
  modified_base 16: mod_base = cm
  modified_base 17: mod_base = OTHER; note = 2'-O-methyladenosine
  modified_base 18: mod_base = cm
  modified_base 19: mod_base = OTHER; note = 2'-O-methyladenosine with a 3'-phosphorothioate linkage
  modified_base 20: mod_base = OTHER; note = 2'-O-methylguanosine with a 3'-phosphorothioate linkage
  modified_base 21: mod_base = OTHER; note = 2'-O-methyladenosine with a 3'-phosphate substitution
agaagggaaggagtacacaga

SEQ ID NO: 486 - RNA, 23 nt, synthetic construct
  source 1..23: mol_type = other RNA
  modified_base 1: mod_base = OTHER; note = 2'-O-methyluridine with a 3'-phosphorothioate linkage and a 5'-phosphate substitution
  modified_base 2: mod_base = OTHER; note = 2'-fluorocytidine with a 3'-phosphorothioate linkage
  modified_base 3: mod_base = um
  modified_base 4: mod_base = gm
  modified_base 5: mod_base = um
  modified_base 6: mod_base = OTHER; note = 2'-fluoroguanosine
  modified_base 7: mod_base = um
  modified_base 8: mod_base = OTHER; note = 2'-O-methyladenosine
  modified_base 9: mod_base = cm
  modified_base 10: mod_base = um
  modified_base 11: mod_base = cm
  modified_base 12: mod_base = cm
  modified_base 13: mod_base = um
  modified_base 14: mod_base = OTHER; note = 2'-fluorouridine
  modified_base 15: mod_base = cm
  modified_base 16: mod_base = OTHER; note = 2'-fluorocytidine
  modified_base 17: mod_base = cm
  modified_base 18: mod_base = um
  modified_base 19: mod_base = um
  modified_base 20: mod_base = cm
  modified_base 21: mod_base = OTHER; note = 2'-O-methyluridine with a 3'-phosphorothioate linkage
  modified_base 22: mod_base = OTHER; note = 2'-O-methyluridine with a 3'-phosphorothioate linkage
  modified_base 23: mod_base = gm
tctgtgtactccttcccttcttg

SEQ ID NO: 487 - RNA, 21 nt, synthetic construct
  source 1..21: mol_type = other RNA
  modified_base 1: mod_base = OTHER; note = 2'-O-methyladenosine with a 3'-phosphorothioate linkage
  modified_base 2: mod_base = OTHER; note = 2'-O-methylguanosine with a 3'-phosphorothioate linkage
  modified_base 3: mod_base = OTHER; note = 2'-O-methyladenosine
  modified_base 4: mod_base = um
  modified_base 5: mod_base = um
  modified_base 6: mod_base = gm
  modified_base 7: mod_base = OTHER; note = 2'-fluorouridine
  modified_base 8: mod_base = gm
  modified_base 9: mod_base = OTHER; note = 2'-fluorouridine
  modified_base 10: mod_base = OTHER; note = 2'-fluoroguanosine
  modified_base 11: mod_base = OTHER; note = 2'-fluoroadenosine
  modified_base 12: mod_base = um
  modified_base 13: mod_base = gm
  modified_base 14: mod_base = OTHER; note = 2'-O-methyladenosine
  modified_base 15: mod_base = OTHER; note = 2'-O-methyladenosine
  modified_base 16: mod_base = gm
  modified_base 17: mod_base = gm
  modified_base 18: mod_base = OTHER; note = 2'-O-methyladenosine
  modified_base 19: mod_base = OTHER; note = 2'-O-methylcytidine with a 3'-phosphorothioate linkage
  modified_base 20: mod_base = OTHER; note = 2'-O-methyladenosine with a 3'-phosphorothioate linkage
  modified_base 21: mod_base = OTHER; note = 2'-O-methyladenosine with a 3'-phosphate substitution
agattgtgtgatgaaggacaa

SEQ ID NO: 488 - RNA, 23 nt, synthetic construct
  source 1..23: mol_type = other RNA
  modified_base 1: mod_base = OTHER; note = 2'-O-methyluridine with a 3'-phosphorothioate linkage and a 5'-phosphate substitution
  modified_base 2: mod_base = OTHER; note = 2'-fluorouridine with a 3'-phosphorothioate linkage
  modified_base 3: mod_base = gm
  modified_base 4: mod_base = um
  modified_base 5: mod_base = cm
  modified_base 6: mod_base = OTHER; note = 2'-fluorocytidine
  modified_base 7: mod_base = um
  modified_base 8: mod_base = um
  modified_base 9: mod_base = cm
  modified_base 10: mod_base = OTHER; note = 2'-O-methyladenosine
  modified_base 11: mod_base = um
  modified_base 12: mod_base = cm
  modified_base 13: mod_base = OTHER; note = 2'-O-methyladenosine
  modified_base 14: mod_base = OTHER; note = 2'-fluorocytidine
  modified_base 15: mod_base = OTHER; note = 2'-O-methyladenosine
  modified_base 16: mod_base = OTHER; note = 2'-fluorocytidine
  modified_base 17: mod_base = OTHER; note = 2'-O-methyladenosine
  modified_base 18: mod_base = OTHER; note = 2'-O-methyladenosine
  modified_base 19: mod_base = um
  modified_base 20: mod_base = cm
  modified_base 21: mod_base = OTHER; note = 2'-O-methyluridine with a 3'-phosphorothioate linkage
  modified_base 22: mod_base = OTHER; note = 2'-O-methyladenosine with a 3'-phosphorothioate linkage
  modified_base 23: mod_base = cm
ttgtccttcatcacacaatctac

SEQ ID NO: 489 - RNA, 21 nt, synthetic construct
  source 1..21: mol_type = other RNA
  modified_base 1: mod_base = OTHER; note = 2'-O-methyluridine with a 3'-phosphorothioate linkage
  modified_base 2: mod_base = OTHER; note = 2'-O-methyluridine with a 3'-phosphorothioate linkage
  modified_base 3: mod_base = um
  modified_base 4: mod_base = cm
  modified_base 5: mod_base = OTHER; note = 2'-O-methyladenosine
  modified_base 6: mod_base = cm
  modified_base 7: mod_base = OTHER; note = 2'-fluorouridine
  modified_base 8: mod_base = um
  modified_base 9: mod_base = OTHER; note = 2'-fluorocytidine
  modified_base 10: mod_base = OTHER; note = 2'-fluoroguanosine
  modified_base 11: mod_base = OTHER; note = 2'-fluoroguanosine
  modified_base 12: mod_base = OTHER; note = 2'-O-methyladenosine
  modified_base 13: mod_base = gm
  modified_base 14: mod_base = gm
  modified_base 15: mod_base = OTHER; note = 2'-O-methyladenosine
  modified_base 16: mod_base = um
  modified_base 17: mod_base = um
  modified_base 18: mod_base = gm
  modified_base 19: mod_base = OTHER; note = 2'-O-methylcytidine with a 3'-phosphorothioate linkage
  modified_base 20: mod_base = OTHER; note = 2'-O-methyluridine with a 3'-phosphorothioate linkage
  modified_base 21: mod_base = OTHER; note = 2'-O-methyladenosine with a 3'-phosphate substitution
tttcacttcggaggattgcta

SEQ ID NO: 490 - RNA, 23 nt, synthetic construct
  source 1..23: mol_type = other RNA
  modified_base 1: mod_base = OTHER; note = 2'-O-methyluridine with a 3'-phosphorothioate linkage and a 5'-phosphate substitution
  modified_base 2: mod_base = OTHER; note = 2'-fluoroadenosine with a 3'-phosphorothioate linkage
  modified_base 3: mod_base = gm
  modified_base 4: mod_base = cm
  modified_base 5: mod_base = OTHER; note = 2'-O-methyladenosine
  modified_base 6: mod_base = OTHER; note = 2'-fluoroadenosine
  modified_base 7: mod_base = um
  modified_base 8: mod_base = cm
  modified_base 9: mod_base = cm
  modified_base 10: mod_base = um
  modified_base 11: mod_base = cm
  modified_base 12: mod_base = cm
  modified_base 13: mod_base = gm
  modified_base 14: mod_base = OTHER; note = 2'-fluoroadenosine
  modified_base 15: mod_base = OTHER; note = 2'-O-methyladenosine
  modified_base 16: mod_base = OTHER; note = 2'-fluoroguanosine
  modified_base 17: mod_base = um
  modified_base 18: mod_base = gm
  modified_base 19: mod_base = OTHER; note = 2'-O-methyladenosine
  modified_base 20: mod_base = OTHER; note = 2'-O-methyladenosine
  modified_base 21: mod_base = OTHER; note = 2'-O-methyladenosine with a 3'-phosphorothioate linkage
  modified_base 22: mod_base = OTHER; note = 2'-O-methylguanosine with a 3'-phosphorothioate linkage
  modified_base 23: mod_base = OTHER; note = 2'-O-methyladenosine
tagcaatcctccgaagtgaaaga

SEQ ID NO: 491 - RNA, 21 nt, synthetic construct
  source 1..21: mol_type = other RNA
  modified_base 1: mod_base = OTHER; note = 2'-O-methyladenosine with a 3'-phosphorothioate linkage
  modified_base 2: mod_base = OTHER; note = 2'-O-methyladenosine with a 3'-phosphorothioate linkage
  modified_base 3: mod_base = gm
  modified_base 4: mod_base = gm
  modified_base 5: mod_base = OTHER; note = 2'-O-methyladenosine
  modified_base 6: mod_base = OTHER; note = 2'-O-methyladenosine
  modified_base 7: mod_base = OTHER; note = 2'-fluoroadenosine
  modified_base 8: mod_base = gm
  modified_base 9: mod_base = OTHER; note = 2'-fluorocytidine
  modified_base 10: mod_base = OTHER; note = 2'-fluorouridine
  modified_base 11: mod_base = OTHER; note = 2'-fluoroadenosine
  modified_base 12: mod_base = gm
  modified_base 13: mod_base = gm
  modified_base 14: mod_base = gm
  modified_base 15: mod_base = OTHER; note = 2'-O-methyladenosine
  modified_base 16: mod_base = cm
  modified_base 17: mod_base = um
  modified_base 18: mod_base = gm
  modified_base 19: mod_base = OTHER; note = 2'-O-methylcytidine with a 3'-phosphorothioate linkage
  modified_base 20: mod_base = OTHER; note = 2'-O-methyladenosine with a 3'-phosphorothioate linkage
  modified_base 21: mod_base = OTHER; note = 2'-O-methyladenosine with a 3'-phosphate substitution
aaggaaagctagggactgcaa

SEQ ID NO: 492 - RNA, 23 nt, synthetic construct
  source 1..23: mol_type = other RNA
  modified_base 1: mod_base = OTHER; note = 2'-O-methyluridine with a 3'-phosphorothioate linkage and a 5'-phosphate substitution
  modified_base 2: mod_base = OTHER; note = 2'-fluorouridine with a 3'-phosphorothioate linkage
  modified_base 3: mod_base = gm
  modified_base 4: mod_base = cm
  modified_base 5: mod_base = OTHER; note = 2'-O-methyladenosine
  modified_base 6: mod_base = OTHER; note = 2'-fluoroguanosine
  modified_base 7: mod_base = um
  modified_base 8: mod_base = cm
  modified_base 9: mod_base = cm
  modified_base 10: mod_base = cm
  modified_base 11: mod_base = um
  modified_base 12: mod_base = OTHER; note = 2'-O-methyladenosine
  modified_base 13: mod_base = gm
  modified_base 14: mod_base = OTHER; note = 2'-fluorocytidine
  modified_base 15: mod_base = um
  modified_base 16: mod_base = OTHER; note = 2'-fluorouridine
  modified_base 17: mod_base = um
  modified_base 18: mod_base = cm
  modified_base 19: mod_base = cm
  modified_base 20: mod_base = um
  modified_base 21: mod_base = OTHER; note = 2'-O-methyluridine with a 3'-phosphorothioate linkage
  modified_base 22: mod_base = OTHER; note = 2'-O-methyluridine with a 3'-phosphorothioate linkage
  modified_base 23: mod_base = cm
ttgcagtccctagctttcctttc

SEQ ID NO: 493 - RNA, 21 nt, synthetic construct
  source 1..21: mol_type = other RNA
  modified_base 1: mod_base = OTHER; note = 2'-O-methylguanosine with a 3'-phosphorothioate linkage
  modified_base 2: mod_base = OTHER; note = 2'-O-methyladenosine with a 3'-phosphorothioate linkage
  modified_base 3: mod_base = cm
  modified_base 4: mod_base = OTHER; note = 2'-O-methyladenosine
  modified_base 5: mod_base = um
  modified_base 6: mod_base = gm
  modified_base 7: mod_base = OTHER; note = 2'-fluoroguanosine
  modified_base 8: mod_base = cm
  modified_base 9: mod_base = OTHER; note = 2'-fluorouridine
  modified_base 10: mod_base = OTHER; note = 2'-fluorouridine
  modified_base 11: mod_base = OTHER; note = 2'-fluoroadenosine
  modified_base 12: mod_base = gm
  modified_base 13: mod_base = OTHER; note = 2'-O-methyladenosine
  modified_base 14: mod_base = OTHER; note = 2'-O-methyladenosine
  modified_base 15: mod_base = gm
  modified_base 16: mod_base = um
  modified_base 17: mod_base = gm
  modified_base 18: mod_base = gm
  modified_base 19: mod_base = OTHER; note = 2'-O-methyladenosine with a 3'-phosphorothioate linkage
  modified_base 20: mod_base = OTHER; note = 2'-O-methyladenosine with a 3'-phosphorothioate linkage
  modified_base 21: mod_base = OTHER; note = 2'-O-methyladenosine with a 3'-phosphate substitution
gacatggcttagaagtggaaa

SEQ ID NO: 494 - RNA, 23 nt, synthetic construct
  source 1..23: mol_type = other RNA
  modified_base 1: mod_base = OTHER; note = 2'-O-methyluridine with a 3'-phosphorothioate linkage and a 5'-phosphate substitution
  modified_base 2: mod_base = OTHER; note = 2'-fluorouridine with a 3'-phosphorothioate linkage
  modified_base 3: mod_base = um
  modified_base 4: mod_base = cm
  modified_base 5: mod_base = cm
  modified_base 6: mod_base = OTHER; note = 2'-fluoroadenosine
  modified_base 7: mod_base = cm
  modified_base 8: mod_base = um
  modified_base 9: mod_base = um
  modified_base 10: mod_base = cm
  modified_base 11: mod_base = um
  modified_base 12: mod_base = OTHER; note = 2'-O-methyladenosine
  modified_base 13: mod_base = OTHER; note = 2'-O-methyladenosine
  modified_base 14: mod_base = OTHER; note = 2'-fluoroguanosine
  modified_base 15: mod_base = cm
  modified_base 16: mod_base = OTHER; note = 2'-fluorocytidine
  modified_base 17: mod_base = OTHER; note = 2'-O-methyladenosine
  modified_base 18: mod_base = um
  modified_base 19: mod_base = gm
  modified_base 20: mod_base = um
  modified_base 21: mod_base = OTHER; note = 2'-O-methylcytidine with a 3'-phosphorothioate linkage
  modified_base 22: mod_base = OTHER; note = 2'-O-methylcytidine with a 3'-phosphorothioate linkage
  modified_base 23: mod_base = um
tttccacttctaagccatgtcct

SEQ ID NO: 495 - RNA, 21 nt, synthetic construct
  source 1..21: mol_type = other RNA
  modified_base 1: mod_base = OTHER; note = 2'-O-methyluridine with a 3'-phosphorothioate linkage
  modified_base 2: mod_base = OTHER; note = 2'-O-methylguanosine with a 3'-phosphorothioate linkage
  modified_base 3: mod_base = um
  modified_base 4: mod_base = OTHER; note = 2'-O-methyladenosine
  modified_base 5: mod_base = cm
  modified_base 6: mod_base = um
  modified_base 7: mod_base = OTHER; note = 2'-fluorocytidine
  modified_base 8: mod_base = um
  modified_base 9: mod_base = OTHER; note = 2'-fluorouridine
  modified_base 10: mod_base = OTHER; note = 2'-fluoroguanosine
  modified_base 11: mod_base = OTHER; note = 2'-fluorocytidine
  modified_base 12: mod_base = OTHER; note = 2'-O-methyladenosine
  modified_base 13: mod_base = gm
  modified_base 14: mod_base = OTHER; note = 2'-O-methyladenosine
  modified_base 15: mod_base = gm
  modified_base 16: mod_base = OTHER; note = 2'-O-methyladenosine
  modified_base 17: mod_base = OTHER; note = 2'-O-methyladenosine
  modified_base 18: mod_base = OTHER; note = 2'-O-methyladenosine
  modified_base 19: mod_base = OTHER; note = 2'-O-methyladenosine with a 3'-phosphorothioate linkage
  modified_base 20: mod_base = OTHER; note = 2'-O-methyluridine with a 3'-phosphorothioate linkage
  modified_base 21: mod_base = OTHER; note = 2'-O-methyladenosine with a 3'-phosphate substitution
tgtactcttgcagagaaaata

SEQ ID NO: 496 - RNA, 23 nt, synthetic construct
  source 1..23: mol_type = other RNA
  modified_base 1: mod_base = OTHER; note = 2'-O-methyluridine with a 3'-phosphorothioate linkage and a 5'-phosphate substitution
  modified_base 2: mod_base = OTHER; note = 2'-fluoroadenosine with a 3'-phosphorothioate linkage
  modified_base 3: mod_base = um
  modified_base 4: mod_base = um
  modified_base 5: mod_base = um
  modified_base 6: mod_base = OTHER; note = 2'-fluorouridine
  modified_base 7: mod_base = cm
  modified_base 8: mod_base = um
  modified_base 9: mod_base = cm
  modified_base 10: mod_base = um
  modified_base 11: mod_base = gm
  modified_base 12: mod_base = cm
  modified_base 13: mod_base = OTHER; note = 2'-O-methyladenosine
  modified_base 14: mod_base = OTHER; note = 2'-fluoroadenosine
  modified_base 15: mod_base = gm
  modified_base 16: mod_base = OTHER; note = 2'-fluoroadenosine
  modified_base 17: mod_base = gm
  modified_base 18: mod_base = um
  modified_base 19: mod_base = OTHER; note = 2'-O-methyladenosine
  modified_base 20: mod_base = cm
  modified_base 21: mod_base = OTHER; note = 2'-O-methyladenosine with a 3'-phosphorothioate linkage
  modified_base 22: mod_base = OTHER; note = 2'-O-methyladenosine with a 3'-phosphorothioate linkage
  modified_base 23: mod_base = OTHER; note = 2'-O-methyladenosine
tattttctctgcaagagtacaaa

SEQ ID NO: 497 - RNA, 21 nt, synthetic construct
  source 1..21: mol_type = other RNA
  modified_base 1: mod_base = OTHER; note = 2'-O-methyladenosine with a 3'-phosphorothioate linkage
  modified_base 2: mod_base = OTHER; note = 2'-O-methyluridine with a 3'-phosphorothioate linkage
  modified_base 3: mod_base = gm
  modified_base 4: mod_base = OTHER; note = 2'-O-methyladenosine
  modified_base 5: mod_base = OTHER; note = 2'-O-methyladenosine
  modified_base 6: mod_base = cm
  modified_base 7: mod_base = OTHER; note = 2'-fluorocytidine
  modified_base 8: mod_base = OTHER; note = 2'-O-methyladenosine
  modified_base 9: mod_base = OTHER; note = 2'-fluoroguanosine
  modified_base 10: mod_base = OTHER; note = 2'-fluoroadenosine
  modified_base 11: mod_base = OTHER; note = 2'-fluorocytidine
  modified_base 12: mod_base = um
  modified_base 13: mod_base = gm
  modified_base 14: mod_base = cm
  modified_base 15: mod_base = gm
  modified_base 16: mod_base = um
  modified_base 17: mod_base = gm
  modified_base 18: mod_base = cm
  modified_base 19: mod_base = OTHER; note = 2'-O-methylcytidine with a 3'-phosphorothioate linkage
  modified_base 20: mod_base = OTHER; note = 2'-O-methylcytidine with a 3'-phosphorothioate linkage
  modified_base 21: mod_base = OTHER; note = 2'-O-methyladenosine with a 3'-phosphate substitution
atgaaccagactgcgtgccca

SEQ ID NO: 498 - RNA, 23 nt, synthetic construct
  source 1..23: mol_type = other RNA
  modified_base 1: mod_base = OTHER; note = 2'-O-methyluridine with a 3'-phosphorothioate linkage and a 5'-phosphate substitution
  modified_base 2: mod_base = OTHER; note = 2'-fluoroguanosine with a 3'-phosphorothioate linkage
  modified_base 3: mod_base = gm
  modified_base 4: mod_base = gm
  modified_base 5: mod_base = cm
  modified_base 6: mod_base = OTHER; note = 2'-fluoroadenosine
  modified_base 7: mod_base = cm
  modified_base 8: mod_base = gm
  modified_base 9: mod_base = cm
  modified_base 10: mod_base = OTHER; note = 2'-O-methyladenosine
  modified_base 11: mod_base = gm
  modified_base 12: mod_base = um
  modified_base 13: mod_base = cm
  modified_base 14: mod_base = OTHER; note = 2'-fluorouridine
  modified_base 15: mod_base = gm
  modified_base 16: mod_base = OTHER; note = 2'-fluoroguanosine
  modified_base 17: mod_base = um
  modified_base 18: mod_base = um
  modified_base 19: mod_base = cm
  modified_base 20: mod_base = OTHER; note = 2'-O-methyladenosine
  modified_base 21: mod_base = OTHER; note = 2'-O-methyluridine with a 3'-phosphorothioate linkage
  modified_base 22: mod_base = OTHER; note = 2'-O-methylcytidine with a 3'-phosphorothioate linkage
  modified_base 23: mod_base = cm
tgggcacgcagtctggttcatcc

SEQ ID NO: 499 - RNA, 21 nt, synthetic construct
  source 1..21: mol_type = other RNA
  modified_base 1: mod_base = OTHER; note = 2'-O-methylcytidine with a 3'-phosphorothioate linkage
  modified_base 2: mod_base = OTHER; note = 2'-O-methyladenosine with a 3'-phosphorothioate linkage
  modified_base 3: mod_base = um
  modified_base 4: mod_base = gm
  modified_base 5: mod_base = OTHER; note = 2'-O-methyladenosine
  modified_base 6: mod_base = cm
  modified_base 7: mod_base = OTHER; note = 2'-fluoroadenosine
  modified_base 8: mod_base = cm
  modified_base 9: mod_base = OTHER; note = 2'-fluorouridine
  modified_base 10: mod_base = OTHER; note = 2'-fluoroadenosine
  modified_base 11: mod_base = OTHER; note = 2'-fluoroadenosine
  modified_base 12: mod_base = gm
  modified_base 13: mod_base = um
  modified_base 14: mod_base = cm
  modified_base 15: mod_base = OTHER; note = 2'-O-methyladenosine
  modified_base 16: mod_base = OTHER; note = 2'-O-methyladenosine
  modified_base 17: mod_base = gm
  modified_base 18: mod_base = um
  modified_base 19: mod_base = OTHER; note = 2'-O-methyluridine with a 3'-phosphorothioate linkage
  modified_base 20: mod_base = OTHER; note = 2'-O-methyladenosine with a 3'-phosphorothioate linkage
  modified_base 21: mod_base = OTHER; note = 2'-O-methyladenosine with a 3'-phosphate substitution
catgacactaagtcaagttaa

SEQ ID NO: 500 - RNA, 23 nt, synthetic construct
  source 1..23: mol_type = other RNA
  modified_base 1: mod_base = OTHER; note = 2'-O-methyluridine with a 3'-phosphorothioate linkage and a 5'-phosphate substitution
  modified_base 2: mod_base = OTHER; note = 2'-fluorouridine with a 3'-phosphorothioate linkage
  modified_base 3: mod_base = OTHER; note = 2'-O-methyladenosine
  modified_base 4: mod_base = OTHER; note = 2'-O-methyladenosine
  modified_base 5: mod_base = cm
  modified_base 6: mod_base = OTHER; note = 2'-fluorouridine
  modified_base 7: mod_base = um
  modified_base 8: mod_base = gm
  modified_base 9: mod_base = OTHER; note = 2'-O-methyladenosine
  modified_base 10: mod_base = cm
  modified_base 11: mod_base = um
  modified_base 12: mod_base = um
  modified_base 13: mod_base = OTHER; note = 2'-O-methyladenosine
  modified_base 14: mod_base = OTHER; note = 2'-fluoroguanosine
  modified_base 15: mod_base = um
  modified_base 16: mod_base = OTHER; note = 2'-fluoroguanosine
  modified_base 17: mod_base = um
  modified_base 18: mod_base = cm
  modified_base 19: mod_base = OTHER; note = 2'-O-methyladenosine
  modified_base 20: mod_base = um
  modified_base 21: mod_base = OTHER; note = 2'-O-methylguanosine with a 3'-phosphorothioate linkage
  modified_base 22: mod_base = OTHER; note = 2'-O-methyladenosine with a 3'-phosphorothioate linkage
  modified_base 23: mod_base = cm
ttaacttgacttagtgtcatgac

SEQ ID NO: 501 - RNA, 21 nt, synthetic construct
  source 1..21: mol_type = other RNA
  modified_base 1: mod_base = OTHER; note = 2'-O-methyluridine with a 3'-phosphorothioate linkage
  modified_base 2: mod_base = OTHER; note = 2'-O-methyluridine with a 3'-phosphorothioate linkage
  modified_base 3: mod_base = gm
  modified_base 4: mod_base = um
  modified_base 5: mod_base = um
  modified_base 6: mod_base = cm
  modified_base 7: mod_base = OTHER; note = 2'-fluoroguanosine
  modified_base 8: mod_base = OTHER; note = 2'-O-methyladenosine
  modified_base 9: mod_base = OTHER; note = 2'-fluoroadenosine
  modified_base 10: mod_base = OTHER; note = 2'-fluoroadenosine
  modified_base 11: mod_base = OTHER; note = 2'-fluoroguanosine
  modified_base 12: mod_base = OTHER; note = 2'-O-methyladenosine
  modified_base 13: mod_base = OTHER; note = 2'-O-methyladenosine
  modified_base 14: mod_base = um
  modified_base 15: mod_base = gm
  modified_base 16: mod_base = gm
  modified_base 17: mod_base = um
  modified_base 18: mod_base = gm
  modified_base 19: mod_base = OTHER; note = 2'-O-methyluridine with a 3'-phosphorothioate linkage
  modified_base 20: mod_base = OTHER; note = 2'-O-methylcytidine with a 3'-phosphorothioate linkage
  modified_base 21: mod_base = OTHER; note = 2'-O-methyladenosine with a 3'-phosphate substitution
ttgttcgaaagaatggtgtca

SEQ ID NO: 502 - RNA, 23 nt, synthetic construct
  source 1..23: mol_type = other RNA
  modified_base 1: mod_base = OTHER; note = 2'-O-methyluridine with a 3'-phosphorothioate linkage and a 5'-phosphate substitution
  modified_base 2: mod_base = OTHER; note = 2'-fluoroguanosine with a 3'-phosphorothioate linkage
  modified_base 3: mod_base = OTHER; note = 2'-O-methyladenosine
  modified_base 4: mod_base = cm
  modified_base 5: mod_base = OTHER; note = 2'-O-methyladenosine
  modified_base 6: mod_base = OTHER; note = 2'-fluorocytidine
  modified_base 7: mod_base = cm
  modified_base 8: mod_base = OTHER; note = 2'-O-methyladenosine
  modified_base 9: mod_base = um
  modified_base 10: mod_base = um
  modified_base 11: mod_base = cm
  modified_base 12: mod_base = um
  modified_base 13: mod_base = um
  modified_base 14: mod_base = OTHER; note = 2'-fluorouridine
  modified_base 15: mod_base = cm
  modified_base 16: mod_base = OTHER; note = 2'-fluoroguanosine
  modified_base 17: mod_base = OTHER; note = 2'-O-methyladenosine
  modified_base 18: mod_base = OTHER; note = 2'-O-methyladenosine
  modified_base 19: mod_base = cm
  modified_base 20: mod_base = OTHER; note = 2'-O-methyladenosine
  modified_base 21: mod_base = OTHER; note = 2'-O-methyladenosine with a 3'-phosphorothioate linkage
  modified_base 22: mod_base = OTHER; note = 2'-O-methyladenosine with a 3'-phosphorothioate linkage
  modified_base 23: mod_base = gm
tgacaccattctttcgaacaaag

SEQ ID NO: 503 - RNA, 21 nt, synthetic construct
  source 1..21: mol_type = other RNA
  modified_base 1: mod_base = OTHER; note = 2'-O-methyladenosine with a 3'-phosphorothioate linkage
  modified_base 2: mod_base = OTHER; note = 2'-O-methylcytidine with a 3'-phosphorothioate linkage
  modified_base 3: mod_base = OTHER; note = 2'-O-methyladenosine
  modified_base 4: mod_base = cm
  modified_base 5: mod_base = um
  modified_base 6: mod_base = gm
  modified_base 7: mod_base = OTHER; note = 2'-fluorouridine
  modified_base 8: mod_base = gm
  modified_base 9: mod_base = OTHER; note = 2'-fluoroadenosine
  modified_base 10: mod_base = OTHER; note = 2'-fluorocytidine
  modified_base 11: mod_base = OTHER; note = 2'-fluorocytidine
  modified_base 12: mod_base = cm
  modified_base 13: mod_base = um
  modified_base 14: mod_base = um
  modified_base 15: mod_base = gm
  modified_base 16: mod_base = cm
  modified_base 17: mod_base = OTHER; note = 2'-O-methyladenosine
  modified_base 18: mod_base = cm
  modified_base 19: mod_base = OTHER; note = 2'-O-methylcytidine with a 3'-phosphorothioate linkage
  modified_base 20: mod_base = OTHER; note = 2'-O-methyladenosine with a 3'-phosphorothioate linkage
  modified_base 21: mod_base = OTHER; note = 2'-O-methyladenosine with a 3'-phosphate substitution
acactgtgacccttgcaccaa

SEQ ID NO: 504 - RNA, 23 nt, synthetic construct
  source 1..23: mol_type = other RNA
  modified_base 1: mod_base = OTHER; note = 2'-O-methyluridine with a 3'-phosphorothioate linkage and a 5'-phosphate substitution
  modified_base 2: mod_base = OTHER; note = 2'-fluorouridine with a 3'-phosphorothioate linkage
  modified_base 3: mod_base = gm
  modified_base 4: mod_base = gm
  modified_base 5: mod_base = um
  modified_base 6: mod_base = OTHER; note = 2'-fluoroguanosine
  modified_base 7: mod_base = cm
  modified_base 8: mod_base = OTHER; note = 2'-O-methyladenosine
  modified_base 9: mod_base = OTHER; note = 2'-O-methyladenosine
  modified_base 10: mod_base = gm
  modified_base 11: mod_base = gm
  modified_base 12: mod_base = gm
  modified_base 13: mod_base = um
  modified_base 14: mod_base = OTHER; note = 2'-fluorocytidine
  modified_base 15: mod_base = OTHER; note = 2'-O-methyladenosine
  modified_base 16: mod_base = OTHER; note = 2'-fluorocytidine
  modified_base 17: mod_base = OTHER; note = 2'-O-methyladenosine
  modified_base 18: mod_base = gm
  modified_base 19: mod_base = um
  modified_base 20: mod_base = gm
  modified_base 21: mod_base = OTHER; note = 2'-O-methyluridine with a 3'-phosphorothioate linkage
  modified_base 22: mod_base = OTHER; note = 2'-O-methyluridine with a 3'-phosphorothioate linkage
  modified_base 23: mod_base = cm
ttggtgcaagggtcacagtgttc

SEQ ID NO: 505 - RNA, 21 nt, synthetic construct
  source 1..21: mol_type = other RNA
  modified_base 1: mod_base = OTHER; note = 2'-O-methylguanosine with a 3'-phosphorothioate linkage
  modified_base 2: mod_base = OTHER; note = 2'-O-methylguanosine with a 3'-phosphorothioate linkage
  modified_base 3: mod_base = OTHER; note = 2'-O-methyladenosine
  modified_base 4: mod_base = OTHER; note = 2'-O-methyladenosine
  modified_base 5: mod_base = OTHER; note = 2'-O-methyladenosine
  modified_base 6: mod_base = um
  modified_base 7: mod_base = OTHER; note = 2'-fluoroadenosine
  modified_base 8: mod_base = OTHER; note = 2'-O-methyladenosine
  modified_base 9: mod_base = OTHER; note = 2'-fluoroadenosine
  modified_base 10: mod_base = OTHER; note = 2'-fluorocytidine
  modified_base 11: mod_base = OTHER; note = 2'-fluorouridine
  modified_base 12: mod_base = gm
  modified_base 13: mod_base = cm
  modified_base 14: mod_base = OTHER; note = 2'-O-methyladenosine
  modified_base 15: mod_base = cm
  modified_base 16: mod_base = cm
  modified_base 17: mod_base = cm
  modified_base 18: mod_base = gm
  modified_base 19: mod_base = OTHER; note = 2'-O-methylguanosine with a 3'-phosphorothioate linkage
  modified_base 20: mod_base = OTHER; note = 2'-O-methyladenosine with a 3'-phosphorothioate linkage
  modified_base 21: mod_base = OTHER; note = 2'-O-methyladenosine with a 3'-phosphate substitution
ggaaataaactgcacccggaa

SEQ ID NO: 506 - RNA, 23 nt, synthetic construct
  source 1..23: mol_type = other RNA
  modified_base 1: mod_base = OTHER; note = 2'-O-methyluridine with a 3'-phosphorothioate linkage and a 5'-phosphate substitution
  modified_base 2: mod_base = OTHER; note = 2'-fluorouridine with a 3'-phosphorothioate linkage
  modified_base 3: mod_base = cm
  modified_base 4: mod_base = cm
  modified_base 5: mod_base = gm
  modified_base 6: mod_base = OTHER; note = 2'-fluoroguanosine
  modified_base 7: mod_base = gm
  modified_base 8: mod_base = um
  modified_base 9: mod_base = gm
  modified_base 10: mod_base = cm
  modified_base 11: mod_base = OTHER; note = 2'-O-methyladenosine
  modified_base 12: mod_base = gm
  modified_base 13: mod_base = um
  modified_base 14: mod_base = OTHER; note = 2'-fluorouridine
  modified_base 15: mod_base = um
  modified_base 16: mod_base = OTHER; note = 2'-fluoroadenosine
  modified_base 17: mod_base = um
  modified_base 18: mod_base = um
  modified_base 19: mod_base = um
  modified_base 20: mod_base = cm
  modified_base 21: mod_base = OTHER; note = 2'-O-methylcytidine with a 3'-phosphorothioate linkage
  modified_base 22: mod_base = OTHER; note = 2'-O-methyladenosine with a 3'-phosphorothioate linkage
  modified_base 23: mod_base = cm
ttccgggtgcagtttatttccac

SEQ ID NO: 507 - RNA, 21 nt, synthetic construct
  source 1..21: mol_type = other RNA
  modified_base 1: mod_base = OTHER; note = 2'-O-methyladenosine with a 3'-phosphorothioate linkage
  modified_base 2: mod_base = OTHER; note = 2'-O-methyladenosine with a 3'-phosphorothioate linkage
  modified_base 3: mod_base = gm
  modified_base 4: mod_base = um
  modified_base 5: mod_base = gm
  modified_base 6: mod_base = um
  modified_base 7: mod_base = OTHER; note = 2'-fluorouridine
  modified_base 8: mod_base = OTHER; note = 2'-O-methyladenosine
  modified_base 9: mod_base = OTHER; note = 2'-fluoroadenosine
  modified_base 10: mod_base = OTHER; note = 2'-fluorouridine
  modified_base 11: mod_base = OTHER; note = 2'-fluoroguanosine
  modified_base 12: mod_base = cm
  modified_base 13: mod_base = cm
  modified_base 14: mod_base = cm
  modified_base 15: mod_base = OTHER; note = 2'-O-methyladenosine
  modified_base 16: mod_base = OTHER; note = 2'-O-methyladenosine
  modified_base 17: mod_base = gm
  modified_base 18: mod_base = um
  modified_base 19: mod_base = OTHER; note = 2'-O-methylguanosine with a 3'-phosphorothioate linkage
  modified_base 20: mod_base = OTHER; note = 2'-O-methyladenosine with a 3'-phosphorothioate linkage
  modified_base 21: mod_base = OTHER; note = 2'-O-methyladenosine with a 3'-phosphate substitution
aagtgttaatgcccaagtgaa

SEQ ID NO: 508 - RNA, 23 nt, synthetic construct
  source 1..23: mol_type = other RNA
  modified_base 1: mod_base = OTHER; note = 2'-O-methyluridine with a 3'-phosphorothioate linkage and a 5'-phosphate substitution
  modified_base 2: mod_base = OTHER; note = 2'-fluorouridine with a 3'-phosphorothioate linkage
  modified_base 3: mod_base = cm
  modified_base 4: mod_base = OTHER; note = 2'-O-methyladenosine
  modified_base 5: mod_base = cm
  modified_base 6: mod_base = OTHER; note = 2'-fluorouridine
  modified_base 7: mod_base = um
  modified_base 8: mod_base = gm
  modified_base 9: mod_base = gm
  modified_base 10: mod_base = gm
  modified_base 11: mod_base = cm
  modified_base 12: mod_base = OTHER; note = 2'-O-methyladenosine
  modified_base 13: mod_base = um
  modified_base 14: mod_base = OTHER; note = 2'-fluorouridine
  modified_base 15: mod_base = OTHER; note = 2'-O-methyladenosine
  modified_base 16: mod_base = OTHER; note = 2'-fluoroadenosine
  modified_base 17: mod_base = cm
  modified_base 18: mod_base = OTHER; note = 2'-O-methyladenosine
  modified_base 19: mod_base = cm
  modified_base 20: mod_base = um
  modified_base 21: mod_base = OTHER; note = 2'-O-methyluridine with a 3'-phosphorothioate linkage
  modified_base 22: mod_base = OTHER; note = 2'-O-methyluridine with a 3'-phosphorothioate linkage
  modified_base 23: mod_base = um
ttcacttgggcattaacactttt

SEQ ID NO: 509 - RNA, 21 nt, synthetic construct
  source 1..21: mol_type = other RNA
  modified_base 1: mod_base = OTHER; note = 2'-O-methyladenosine with a 3'-phosphorothioate linkage
  modified_base 2: mod_base = OTHER; note = 2'-O-methylguanosine with a 3'-phosphorothioate linkage
  modified_base 3: mod_base = um
  modified_base 4: mod_base = um
  modified_base 5: mod_base = cm
  modified_base 6: mod_base = OTHER; note = 2'-O-methyladenosine
  modified_base 7: mod_base = OTHER; note = 2'-fluoroadenosine
  modified_base 8: mod_base = cm
  modified_base 9: mod_base = OTHER; note = 2'-fluorouridine
  modified_base 10: mod_base = OTHER; note = 2'-fluoroguanosine
  modified_base 11: mod_base = OTHER; note = 2'-fluorocytidine
  modified_base 12: mod_base = um
  modified_base 13: mod_base = um
  modified_base 14: mod_base = cm
  modified_base 15: mod_base = gm
  modified_base 16: mod_base = um
  modified_base 17: mod_base = OTHER; note = 2'-O-methyladenosine
  modified_base 18: mod_base = OTHER; note = 2'-O-methyladenosine
  modified_base 19: mod_base = OTHER; note = 2'-O-methyluridine with a 3'-phosphorothioate linkage
  modified_base 20: mod_base = OTHER; note = 2'-O-methyluridine with a 3'-phosphorothioate linkage
  modified_base 21: mod_base = OTHER; note = 2'-O-methyladenosine with a 3'-phosphate substitution
agttcaactgcttcgtaatta

SEQ ID NO: 510 - RNA, 23 nt, synthetic construct
  source 1..23: mol_type = other RNA
  modified_base 1: mod_base = OTHER; note = 2'-O-methyluridine with a 3'-phosphorothioate linkage and a 5'-phosphate substitution
  modified_base 2: mod_base = OTHER; note = 2'-fluoroadenosine with a 3'-phosphorothioate linkage
  modified_base 3: mod_base = OTHER; note = 2'-O-methyladenosine
  modified_base 4: mod_base = um
  modified_base 5: mod_base = um
  modified_base 6: mod_base = OTHER; note = 2'-fluoroadenosine
  modified_base 7: mod_base = cm
  modified_base 8: mod_base = gm
  modified_base 9: mod_base = OTHER; note = 2'-O-methyladenosine
  modified_base 10: mod_base = OTHER; note = 2'-O-methyladenosine
  modified_base 11: mod_base = gm
  modified_base 12: mod_base = cm
  modified_base 13: mod_base = OTHER; note = 2'-O-methyladenosine
  modified_base 14: mod_base = OTHER; note = 2'-fluoroguanosine
  modified_base 15: mod_base = um
  modified_base 16: mod_base = OTHER; note = 2'-fluorouridine
  modified_base 17: mod_base = gm
  modified_base 18: mod_base = OTHER; note = 2'-O-methyladenosine
  modified_base 19: mod_base = OTHER; note = 2'-O-methyladenosine
  modified_base 20: mod_base = cm
  modified_base 21: mod_base = OTHER; note = 2'-O-methyluridine with a 3'-phosphorothioate linkage
  modified_base 22: mod_base = OTHER; note = 2'-O-methyluridine with a 3'-phosphorothioate linkage
  modified_base 23: mod_base = um
taattacgaagcagttgaacttt

SEQ ID NO: 511 - RNA, 21 nt, synthetic construct
  source 1..21: mol_type = other RNA
  modified_base 1: mod_base = OTHER; note = 2'-O-methylcytidine with a 3'-phosphorothioate linkage
  modified_base 2: mod_base = OTHER; note = 2'-O-methyladenosine with a 3'-phosphorothioate linkage
  modified_base 3: mod_base = cm
  modified_base 4: mod_base = um
  modified_base 5: mod_base = um
  modified_base 6: mod_base = cm
  modified_base 7: mod_base = OTHER; note = 2'-fluoroguanosine
  modified_base 8: mod_base = gm
  modified_base 9: mod_base = OTHER; note = 2'-fluoroadenosine
  modified_base 10: mod_base = OTHER; note = 2'-fluoroguanosine
  modified_base 11: mod_base = OTHER; note = 2'-fluoroguanosine
  modified_base 12: mod_base = OTHER; note = 2'-O-methyladenosine
  modified_base 13: mod_base = um
  modified_base 14: mod_base = um
  modified_base 15: mod_base = gm
  modified_base 16: mod_base = cm
  modified_base 17: mod_base = um
  modified_base 18: mod_base = cm
  modified_base 19: mod_base = OTHER; note = 2'-O-methyladenosine with a 3'-phosphorothioate linkage
  modified_base 20: mod_base = OTHER; note = 2'-O-methyladenosine with a 3'-phosphorothioate linkage
  modified_base 21: mod_base = OTHER; note = 2'-O-methyladenosine with a 3'-phosphate substitution
cacttcggaggattgctcaaa

SEQ ID NO: 512 - RNA, 23 nt, synthetic construct
  source 1..23: mol_type = other RNA
  modified_base 1: mod_base = OTHER; note = 2'-O-methyluridine with a 3'-phosphorothioate linkage and a 5'-phosphate substitution
  modified_base 2: mod_base = OTHER; note = 2'-fluorouridine with a 3'-phosphorothioate linkage
  modified_base 3: mod_base = um
  modified_base 4: mod_base = gm
  modified_base 5: mod_base = OTHER; note = 2'-O-methyladenosine
  modified_base 6: mod_base = OTHER; note = 2'-fluoroguanosine
  modified_base 7: mod_base = cm
  modified_base 8: mod_base = OTHER; note = 2'-O-methyladenosine
  modified_base 9: mod_base = OTHER; note = 2'-O-methyladenosine
  modified_base 10: mod_base = um
  modified_base 11: mod_base = cm
  modified_base 12: mod_base = cm
  modified_base 13: mod_base = um
  modified_base 14: mod_base = OTHER; note = 2'-fluorocytidine
  modified_base 15: mod_base = cm
  modified_base 16: mod_base = OTHER; note = 2'-fluoroguanosine
  modified_base 17: mod_base = OTHER; note = 2'-O-methyladenosine
  modified_base 18: mod_base = OTHER; note = 2'-O-methyladenosine
  modified_base 19: mod_base = gm
  modified_base 20: mod_base = um
  modified_base 21: mod_base = OTHER; note = 2'-O-methylguanosine with a 3'-phosphorothioate linkage
  modified_base 22: mod_base = OTHER; note = 2'-O-methyladenosine with a 3'-phosphorothioate linkage
  modified_base 23: mod_base = OTHER; note = 2'-O-methyladenosine
tttgagcaatcctccgaagtgaa

SEQ ID NO: 513 - RNA, 21 nt, synthetic construct
  source 1..21: mol_type = other RNA
  modified_base 1: mod_base = OTHER; note = 2'-O-methyladenosine with a 3'-phosphorothioate linkage
  modified_base 2: mod_base = OTHER; note = 2'-O-methyluridine with a 3'-phosphorothioate linkage
  modified_base 3: mod_base = gm
  modified_base 4: mod_base = OTHER; note = 2'-O-methyladenosine
  modified_base 5: mod_base = OTHER; note = 2'-O-methyladenosine
  modified_base 6: mod_base = gm
  modified_base 7: mod_base = OTHER; note = 2'-fluorocytidine
  modified_base 8: mod_base = cm
  modified_base 9: mod_base = OTHER; note = 2'-fluoroadenosine
  modified_base 10: mod_base = OTHER; note = 2'-fluoroadenosine
  modified_base 11: mod_base = OTHER; note = 2'-fluoroadenosine
  modified_base 12: mod_base = OTHER; note = 2'-O-methyladenosine
  modified_base 13: mod_base = um
  modified_base 14: mod_base = OTHER; note = 2'-O-methyladenosine
  modified_base 15: mod_base = gm
  modified_base 16: mod_base = OTHER; note = 2'-O-methyladenosine
  modified_base 17: mod_base = um
  modified_base 18: mod_base = gm
  modified_base 19: mod_base = OTHER; note = 2'-O-methyladenosine with a 3'-phosphorothioate linkage
  modified_base 20: mod_base = OTHER; note = 2'-O-methylguanosine with a 3'-phosphorothioate linkage
  modified_base 21: mod_base = OTHER; note = 2'-O-methyladenosine with a 3'-phosphate substitution
atgaagccaaaatagatgaga

SEQ ID NO: 514 - RNA, 23 nt, synthetic construct
  source 1..23: mol_type = other RNA
  modified_base 1: mod_base = OTHER; note = 2'-O-methyluridine with a 3'-phosphorothioate linkage and a 5'-phosphate substitution
  modified_base 2: mod_base = OTHER; note = 2'-fluorocytidine with a 3'-phosphorothioate linkage
  modified_base 3: mod_base = um
  modified_base 4: mod_base = cm
  modified_base 5: mod_base = OTHER; note = 2'-O-methyladenosine
  modified_base 6: mod_base = OTHER; note = 2'-fluorouridine
  modified_base 7: mod_base = cm
  modified_base 8: mod_base = um
  modified_base 9: mod_base = OTHER; note = 2'-O-methyladenosine
  modified_base 10: mod_base = um
  modified_base 11: mod_base = um
  modified_base 12: mod_base = um
  modified_base 13: mod_base = um
  modified_base 14: mod_base = OTHER; note = 2'-fluoroguanosine
  modified_base 15: mod_base = gm
  modified_base 16: mod_base = OTHER; note = 2'-fluorocytidine
  modified_base 17: mod_base = um
  modified_base 18: mod_base = um
  modified_base 19: mod_base = cm
  modified_base 20: mod_base = OTHER; note = 2'-O-methyladenosine
  modified_base 21: mod_base = OTHER; note = 2'-O-methyluridine with a 3'-phosphorothioate linkage
  modified_base 22: mod_base = OTHER; note = 2'-O-methyluridine with a 3'-phosphorothioate linkage
  modified_base 23: mod_base = gm
tctcatctattttggcttcattg

SEQ ID NO: 515 - RNA, 21 nt, synthetic construct
  source 1..21: mol_type = other RNA
  modified_base 1: mod_base = OTHER; note = 2'-O-methyladenosine with a 3'-phosphorothioate linkage
  modified_base 2: mod_base = OTHER; note = 2'-O-methylcytidine with a 3'-phosphorothioate linkage
  modified_base 3: mod_base = um
  modified_base 4: mod_base = um
  modified_base 5: mod_base = cm
  modified_base 6: mod_base = gm
  modified_base 7: mod_base = OTHER; note = 2'-fluoroguanosine
  modified_base 8: mod_base = OTHER; note = 2'-O-methyladenosine
  modified_base 9: mod_base = OTHER; note = 2'-fluoroguanosine
  modified_base 10: mod_base = OTHER; note = 2'-fluoroguanosine
  modified_base 11: mod_base = OTHER; note = 2'-fluoroadenosine
  modified_base 12: mod_base = um
  modified_base 13: mod_base = um
  modified_base 14: mod_base = gm
  modified_base 15: mod_base = cm
  modified_base 16: mod_base = um
  modified_base 17: mod_base = cm
  modified_base 18: mod_base = OTHER; note = 2'-O-methyladenosine
  modified_base 19: mod_base = OTHER; note = 2'-O-methyladenosine with a 3'-phosphorothioate linkage
  modified_base 20: mod_base = OTHER; note = 2'-O-methylcytidine with a 3'-phosphorothioate linkage
  modified_base 21: mod_base = OTHER; note = 2'-O-methyladenosine with a 3'-phosphate substitution
acttcggaggattgctcaaca

SEQ ID NO: 516 - RNA, 23 nt, synthetic construct
  source 1..23: mol_type = other RNA
  modified_base 1: mod_base = OTHER; note = 2'-O-methyluridine with a 3'-phosphorothioate linkage and a 5'-phosphate substitution
  modified_base 2: mod_base = OTHER; note = 2'-fluoroguanosine with a 3'-phosphorothioate linkage
  modified_base 3: mod_base = um
  modified_base 4: mod_base = um
  modified_base 5: mod_base = gm
  modified_base 6: mod_base = OTHER; note = 2'-fluoroadenosine
  modified_base 7: mod_base = gm
  modified_base 8: mod_base = cm
  modified_base 9: mod_base = OTHER; note = 2'-O-methyladenosine
  modified_base 10: mod_base = OTHER; note = 2'-O-methyladenosine
  modified_base 11: mod_base = um
  modified_base 12: mod_base = cm
  modified_base 13: mod_base = cm
  modified_base 14: mod_base = OTHER; note = 2'-fluorouridine
  modified_base 15: mod_base = cm
  modified_base 16: mod_base = OTHER; note = 2'-fluorocytidine
  modified_base 17: mod_base = gm
  modified_base 18: mod_base = OTHER; note = 2'-O-methyladenosine
  modified_base 19: mod_base = OTHER; note = 2'-O-methyladenosine
  modified_base 20: mod_base = gm
  modified_base 21: mod_base = OTHER; note = 2'-O-methyluridine with a 3'-phosphorothioate linkage
  modified_base 22: mod_base = OTHER; note = 2'-O-methylguanosine with a 3'-phosphorothioate linkage
  modified_base 23: mod_base = OTHER; note = 2'-O-methyladenosine
tgttgagcaatcctccgaagtga

SEQ ID NO: 517 - RNA, 21 nt, synthetic construct
  source 1..21: mol_type = other RNA
  modified_base 1: mod_base = OTHER; note = 2'-O-methyladenosine with a 3'-phosphorothioate linkage
  modified_base 2: mod_base = OTHER; note = 2'-O-methylguanosine with a 3'-phosphorothioate linkage
  modified_base 3: mod_base = gm
  modified_base 4: mod_base = um
  modified_base 5: mod_base = gm
  modified_base 6: mod_base = OTHER; note = 2'-O-methyladenosine
  modified_base 7: mod_base = OTHER; note = 2'-fluoroadenosine
  modified_base 8: mod_base = OTHER; note = 2'-O-methyladenosine
  modified_base 9: mod_base = OTHER; note = 2'-fluoroguanosine
  modified_base 10: mod_base = OTHER; note = 2'-fluoroguanosine
  modified_base 11: mod_base = OTHER; note = 2'-fluoroadenosine
  modified_base 12: mod_base = OTHER; note = 2'-O-methyladenosine
  modified_base 13: mod_base = OTHER; note = 2'-O-methyladenosine
  modified_base 14: mod_base = gm
  modified_base 15: mod_base = cm
  modified_base 16: mod_base = um
  modified_base 17: mod_base = OTHER; note = 2'-O-methyladenosine
  modified_base 18: mod_base = gm
  modified_base 19: mod_base = OTHER; note = 2'-O-methylguanosine with a 3'-phosphorothioate linkage
  modified_base 20: mod_base = OTHER; note = 2'-O-methylguanosine with a 3'-phosphorothioate linkage
  modified_base 21: mod_base = OTHER; note = 2'-O-methyladenosine with a 3'-phosphate substitution
aggtgaaaggaaagctaggga

SEQ ID NO: 518 - RNA, 23 nt, synthetic construct
  source 1..23: mol_type = other RNA
  modified_base 1: mod_base = OTHER; note = 2'-O-methyluridine with a 3'-phosphorothioate linkage and a 5'-phosphate substitution
  modified_base 2: mod_base = OTHER; note = 2'-fluorocytidine with a 3'-phosphorothioate linkage
  modified_base 3: mod_base = cm
  modified_base 4: mod_base = cm
  modified_base 5: mod_base = um
  modified_base 6: mod_base = OTHER; note = 2'-fluoroadenosine
  modified_base 7: mod_base = gm
  modified_base 8: mod_base = cm
  modified_base 9: mod_base = um
  modified_base 10: mod_base = um
  modified_base 11: mod_base = um
  modified_base 12: mod_base = cm
  modified_base 13: mod_base = cm
  modified_base 14: mod_base = OTHER; note = 2'-fluorouridine
  modified_base 15: mod_base = um
  modified_base 16: mod_base = OTHER; note = 2'-fluorouridine
  modified_base 17: mod_base = cm
  modified_base 18: mod_base = OTHER; note = 2'-O-methyladenosine
  modified_base 19: mod_base = cm
  modified_base 20: mod_base = cm
  modified_base 21: mod_base = OTHER; note = 2'-O-methyluridine with a 3'-phosphorothioate linkage
  modified_base 22: mod_base = OTHER; note = 2'-O-methylguanosine with a 3'-phosphorothioate linkage
  modified_base 23: mod_base = gm
tccctagctttcctttcacctgg

SEQ ID NO: 519 - RNA, 21 nt, synthetic construct
  source 1..21: mol_type = other RNA
  modified_base 1: mod_base = OTHER; note = 2'-O-methyladenosine with a 3'-phosphorothioate linkage
  modified_base 2: mod_base = OTHER; note = 2'-O-methyladenosine with a 3'-phosphorothioate linkage
  modified_base 3: mod_base = gm
  modified_base 4: mod_base = gm
  modified_base 5: mod_base = gm
  modified_base 6: mod_base = OTHER; note = 2'-O-methyladenosine
  modified_base 7: mod_base = OTHER; note = 2'-fluoroadenosine
  modified_base 8: mod_base = gm
  modified_base 9: mod_base = OTHER; note = 2'-fluoroguanosine
  modified_base 10: mod_base = OTHER; note = 2'-fluoroadenosine
  modified_base 11: mod_base = OTHER; note = 2'-fluoroguanosine
  modified_base 12: mod_base = um
  modified_base 13: mod_base = OTHER; note = 2'-O-methyladenosine
  modified_base 14: mod_base = cm
  modified_base 15: mod_base = OTHER; note = 2'-O-methyladenosine
  modified_base 16: mod_base = cm
  modified_base 17: mod_base = OTHER; note = 2'-O-methyladenosine
  modified_base 18: mod_base = gm
  modified_base 19: mod_base = OTHER; note = 2'-O-methyladenosine with a 3'-phosphorothioate linkage
  modified_base 20: mod_base = OTHER; note = 2'-O-methylcytidine with a 3'-phosphorothioate linkage
  modified_base 21: mod_base = OTHER; note = 2'-O-methyladenosine with a 3'-phosphate substitution
aagggaaggagtacacagaca

SEQ ID NO: 520 - RNA, 23 nt, synthetic construct
  source 1..23: mol_type = other RNA
  modified_base 1: mod_base = OTHER; note = 2'-O-methyluridine with a 3'-phosphorothioate linkage and a 5'-phosphate substitution
  modified_base 2: mod_base = OTHER; note = 2'-fluoroguanosine with a 3'-phosphorothioate linkage
  modified_base 3: mod_base = um
  modified_base 4: mod_base = cm
  modified_base 5: mod_base = um
  modified_base 6: mod_base = OTHER; note = 2'-fluoroguanosine
  modified_base 7: mod_base = um
  modified_base 8: mod_base = gm
  modified_base 9: mod_base = um
  modified_base 10: mod_base = OTHER; note = 2'-O-methyladenosine
  modified_base 11: mod_base = cm
  modified_base 12: mod_base = um
  modified_base 13: mod_base = cm
  modified_base 14: mod_base = OTHER; note = 2'-fluorocytidine
  modified_base 15: mod_base = um
  modified_base 16: mod_base = OTHER; note = 2'-fluorouridine
  modified_base 17: mod_base = cm
  modified_base 18: mod_base = cm
  modified_base 19: mod_base = cm
  modified_base 20: mod_base = um
  modified_base 21: mod_base = OTHER; note = 2'-O-methyluridine with a 3'-phosphorothioate linkage
  modified_base 22: mod_base = OTHER; note = 2'-O-methylcytidine with a 3'-phosphorothioate linkage
  modified_base 23: mod_base = um
tgtctgtgtactccttcccttct

SEQ ID NO: 521 - RNA, 21 nt, synthetic construct
  source 1..21: mol_type = other RNA
  modified_base 1: mod_base = OTHER; note = 2'-O-methyladenosine with a 3'-phosphorothioate linkage
  modified_base 2: mod_base = OTHER; note = 2'-O-methylguanosine with a 3'-phosphorothioate linkage
  modified_base 3: mod_base = um
  modified_base 4: mod_base = gm
  modified_base 5: mod_base = gm
  modified_base 6: mod_base = OTHER; note = 2'-O-methyladenosine
  modified_base 7: mod_base = OTHER; note = 2'-fluoroadenosine
  modified_base 8: mod_base = OTHER; note = 2'-O-methyladenosine
  modified_base 9: mod_base = OTHER; note = 2'-fluorouridine
  modified_base 10: mod_base = OTHER; note = 2'-fluoroadenosine
  modified_base 11: mod_base = OTHER; note = 2'-fluoroadenosine
  modified_base 12: mod_base = OTHER; note = 2'-O-methyladenosine
  modified_base 13: mod_base = cm
  modified_base 14: mod_base = um
  modified_base 15: mod_base = gm
  modified_base 16: mod_base = cm
  modified_base 17: mod_base = OTHER; note = 2'-O-methyladenosine
  modified_base 18: mod_base = cm
  modified_base 19: mod_base = OTHER; note = 2'-O-methylcytidine with a 3'-phosphorothioate linkage
  modified_base 20: mod_base = OTHER; note = 2'-O-methylcytidine with a 3'-phosphorothioate linkage
  modified_base 21: mod_base = OTHER; note = 2'-O-methyladenosine with a 3'-phosphate substitution
agtggaaataaactgcaccca

SEQ ID NO: 522 - RNA, 23 nt, synthetic construct
  source 1..23: mol_type = other RNA
  modified_base 1: mod_base = OTHER; note = 2'-O-methyluridine with a 3'-phosphorothioate linkage and a 5'-phosphate substitution
  modified_base 2: mod_base = OTHER; note = 2'-fluoroguanosine with a 3'-phosphorothioate linkage
  modified_base 3: mod_base = gm
  modified_base 4: mod_base = gm
  modified_base 5: mod_base = um
  modified_base 6: mod_base = OTHER; note = 2'-fluoroguanosine
  modified_base 7: mod_base = cm
  modified_base 8: mod_base = OTHER; note = 2'-O-methyladenosine
  modified_base 9: mod_base = gm
  modified_base 10: mod_base = um
  modified_base 11: mod_base = um
  modified_base 12: mod_base = um
  modified_base 13: mod_base = OTHER; note = 2'-O-methyladenosine
  modified_base 14: mod_base = OTHER; note = 2'-fluorouridine
  modified_base 15: mod_base = um
  modified_base 16: mod_base = OTHER; note = 2'-fluorouridine
  modified_base 17: mod_base = cm
  modified_base 18: mod_base = cm
  modified_base 19: mod_base = OTHER; note = 2'-O-methyladenosine
  modified_base 20: mod_base = cm
  modified_base 21: mod_base = OTHER; note = 2'-O-methyluridine with a 3'-phosphorothioate linkage
  modified_base 22: mod_base = OTHER; note = 2'-O-methyluridine with a 3'-phosphorothioate linkage
  modified_base 23: mod_base = cm
tgggtgcagtttatttccacttc

SEQ ID NO: 523 - RNA, 21 nt, synthetic construct
  source 1..21: mol_type = other RNA
  modified_base 1: mod_base = OTHER; note = 2'-O-methyladenosine with a 3'-phosphorothioate linkage
  modified_base 2: mod_base = OTHER; note = 2'-O-methyluridine with a 3'-phosphorothioate linkage
  modified_base 3: mod_base = gm
  modified_base 4: mod_base = OTHER; note = 2'-O-methyladenosine
  modified_base 5: mod_base = cm
  modified_base 6: mod_base = OTHER; note = 2'-O-methyladenosine
  modified_base 7: mod_base = OTHER; note = 2'-fluoroadenosine
  modified_base 8: mod_base = um
  modified_base 9: mod_base = OTHER; note = 2'-fluoroguanosine
  modified_base 10: mod_base = OTHER; note = 2'-fluorouridine
  modified_base 11: mod_base = OTHER; note = 2'-fluorocytidine
  modified_base 12: mod_base = cm
  modified_base 13: mod_base = OTHER; note = 2'-O-methyladenosine
  modified_base 14: mod_base = OTHER; note = 2'-O-methyladenosine
  modified_base 15: mod_base = gm
  modified_base 16: mod_base = OTHER; note = 2'-O-methyladenosine
  modified_base 17: mod_base = cm
  modified_base 18: mod_base = OTHER; note = 2'-O-methyladenosine
  modified_base 19: mod_base = OTHER; note = 2'-O-methylcytidine with a 3'-phosphorothioate linkage
  modified_base 20: mod_base = OTHER; note = 2'-O-methyladenosine with a 3'-phosphorothioate linkage
  modified_base 21: mod_base = OTHER; note = 2'-O-methyladenosine with a 3'-phosphate substitution
atgacaatgtccaagacacaa

SEQ ID NO: 524 - RNA, 23 nt, synthetic construct
  source 1..23: mol_type = other RNA
  modified_base 1: mod_base = OTHER; note = 2'-O-methyluridine with a 3'-phosphorothioate linkage and a 5'-phosphate substitution
  modified_base 2: mod_base = OTHER; note = 2'-fluorouridine with a 3'-phosphorothioate linkage
  modified_base 3: mod_base = gm
  modified_base 4: mod_base = um
  modified_base 5: mod_base = gm
  modified_base 6: mod_base = OTHER; note = 2'-fluorouridine
  modified_base 7: mod_base = cm
  modified_base 8: mod_base = um
  modified_base 9: mod_base = um
  modified_base 10: mod_base = gm
  modified_base 11: mod_base = gm
  modified_base 12: mod_base = OTHER; note = 2'-O-methyladenosine
  modified_base 13: mod_base = cm
  modified_base 14: mod_base = OTHER; note = 2'-fluoroadenosine
  modified_base 15: mod_base = um
  modified_base 16: mod_base = OTHER; note = 2'-fluorouridine
  modified_base 17: mod_base = gm
  modified_base 18: mod_base = um
  modified_base 19: mod_base = cm
  modified_base 20: mod_base = OTHER; note = 2'-O-methyladenosine
  modified_base 21: mod_base = OTHER; note = 2'-O-methyluridine with a 3'-phosphorothioate linkage
  modified_base 22: mod_base = OTHER; note = 2'-O-methyluridine with a 3'-phosphorothioate linkage
  modified_base 23: mod_base = cm
ttgtgtcttggacattgtcattc

SEQ ID NO: 525 - RNA, 21 nt, synthetic construct
  source 1..21: mol_type = other RNA
  modified_base 1: mod_base = OTHER; note = 2'-O-methylguanosine with a 3'-phosphorothioate linkage
  modified_base 2: mod_base = OTHER; note = 2'-O-methyladenosine with a 3'-phosphorothioate linkage
  modified_base 3: mod_base = um
  modified_base 4: mod_base = um
  modified_base 5: mod_base = gm
  modified_base 6: mod_base = um
  modified_base 7: mod_base = OTHER; note = 2'-fluoroguanosine
  modified_base 8: mod_base = um
  modified_base 9: mod_base = OTHER; note = 2'-fluoroguanosine
  modified_base 10: mod_base = OTHER; note = 2'-fluoroadenosine
  modified_base 11: mod_base = OTHER; note = 2'-fluorouridine
  modified_base 12: mod_base = gm
  modified_base 13: mod_base = OTHER; note = 2'-O-methyladenosine
  modified_base 14: mod_base = OTHER; note = 2'-O-methyladenosine
  modified_base 15: mod_base = gm
  modified_base 16: mod_base = gm
  modified_base 17: mod_base = OTHER; note = 2'-O-methyladenosine
  modified_base 18: mod_base = cm
  modified_base 19: mod_base = OTHER; note = 2'-O-methyladenosine with a 3'-phosphorothioate linkage
  modified_base 20: mod_base = OTHER; note = 2'-O-methyluridine with a 3'-phosphorothioate linkage
  modified_base 21: mod_base = OTHER; note = 2'-O-methyladenosine with a 3'-phosphate substitution
gattgtgtgatgaaggacata

SEQ ID NO: 526 - RNA, 23 nt, synthetic construct
  source 1..23: mol_type = other RNA
  modified_base 1: mod_base = OTHER; note = 2'-O-methyluridine with a 3'-phosphorothioate linkage and a 5'-phosphate substitution
  modified_base 2: mod_base = OTHER; note = 2'-fluoroadenosine with a 3'-phosphorothioate linkage
  modified_base 3: mod_base = um
  modified_base 4: mod_base = gm
  modified_base 5: mod_base = um
  modified_base 6: mod_base = OTHER; note = 2'-fluorocytidine
  modified_base 7: mod_base = cm
  modified_base 8: mod_base = um
  modified_base 9: mod_base = um
  modified_base 10: mod_base = cm
  modified_base 11: mod_base = OTHER; note = 2'-O-methyladenosine
  modified_base 12: mod_base = um
  modified_base 13: mod_base = cm
  modified_base 14: mod_base = OTHER; note = 2'-fluoroadenosine
  modified_base 15: mod_base = cm
  modified_base 16: mod_base = OTHER; note = 2'-fluoroadenosine
  modified_base 17: mod_base = cm
  modified_base 18: mod_base = OTHER; note = 2'-O-methyladenosine
  modified_base 19: mod_base = OTHER; note = 2'-O-methyladenosine
  modified_base 20: mod_base = um
  modified_base 21: mod_base = OTHER; note = 2'-O-methylcytidine with a 3'-phosphorothioate linkage
  modified_base 22: mod_base = OTHER; note = 2'-O-methyluridine with a 3'-phosphorothioate linkage
  modified_base 23: mod_base = OTHER; note = 2'-O-methyladenosine
tatgtccttcatcacacaatcta

SEQ ID NO: 527 - RNA, 21 nt, synthetic construct
  source 1..21: mol_type = other RNA
  modified_base 1: mod_base = OTHER; note = 2'-O-methylguanosine with a 3'-phosphorothioate linkage
  modified_base 2: mod_base = OTHER; note = 2'-O-methylguanosine with a 3'-phosphorothioate linkage
  modified_base 3: mod_base = gm
  modified_base 4: mod_base = gm
  modified_base 5: mod_base = OTHER; note = 2'-O-methyladenosine
  modified_base 6: mod_base = um
  modified_base 7: mod_base = OTHER; note = 2'-fluoroguanosine
  modified_base 8: mod_base = OTHER; note = 2'-O-methyladenosine
  modified_base 9: mod_base = OTHER; note = 2'-fluoroadenosine
  modified_base 10: mod_base = OTHER; note = 2'-fluorocytidine
  modified_base 11: mod_base = OTHER; note = 2'-fluorocytidine
  modified_base 12: mod_base = OTHER; note = 2'-O-methyladenosine
  modified_base 13: mod_base = gm
  modified_base 14: mod_base = OTHER; note = 2'-O-methyladenosine
  modified_base 15: mod_base = cm
  modified_base 16: mod_base = um
  modified_base 17: mod_base = gm
  modified_base 18: mod_base = cm
  modified_base 19: mod_base = OTHER; note = 2'-O-methylguanosine with a 3'-phosphorothioate linkage
  modified_base 20: mod_base = OTHER; note = 2'-O-methyluridine with a 3'-phosphorothioate linkage
  modified_base 21: mod_base = OTHER; note = 2'-O-methyladenosine with a 3'-phosphate substitution
ggggatgaaccagactgcgta

SEQ ID NO: 528 - RNA, 23 nt, synthetic construct
  source 1..23: mol_type = other RNA
  modified_base 1: mod_base = OTHER; note = 2'-O-methyluridine with a 3'-phosphorothioate linkage and a 5'-phosphate substitution
  modified_base 2: mod_base = OTHER; note = 2'-fluoroadenosine with a 3'-phosphorothioate linkage
  modified_base 3: mod_base = cm
  modified_base 4: mod_base = gm
  modified_base 5: mod_base = cm
  modified_base 6: mod_base = OTHER; note = 2'-fluoroadenosine
  modified_base 7: mod_base = gm
  modified_base 8: mod_base = um
  modified_base 9: mod_base = cm
  modified_base 10: mod_base = um
  modified_base 11: mod_base = gm
  modified_base 12: mod_base = gm
  modified_base 13: mod_base = um
  modified_base 14: mod_base = OTHER; note = 2'-fluorouridine
  modified_base 15: mod_base = cm
  modified_base 16: mod_base = OTHER; note = 2'-fluoroadenosine
  modified_base 17: mod_base = um
  modified_base 18: mod_base = cm
  modified_base 19: mod_base = cm
  modified_base 20: mod_base = cm
  modified_base 21: mod_base = OTHER; note = 2'-O-methylcytidine with a 3'-phosphorothioate linkage
  modified_base 22: mod_base = OTHER; note = 2'-O-methyladenosine with a 3'-phosphorothioate linkage
  modified_base 23: mod_base = um
tacgcagtctggttcatccccat

SEQ ID NO: 529 - RNA, 21 nt, synthetic construct
  source 1..21: mol_type = other RNA
  modified_base 1: mod_base = OTHER; note = 2'-O-methylguanosine with a 3'-phosphorothioate linkage
  modified_base 2: mod_base = OTHER; note = 2'-O-methyluridine with a 3'-phosphorothioate linkage
  modified_base 3: mod_base = um
  modified_base 4: mod_base = OTHER; note = 2'-O-methyladenosine
  modified_base 5: mod_base = OTHER; note = 2'-O-methyladenosine
  modified_base 6: mod_base = um
  modified_base 7: mod_base = OTHER; note = 2'-fluoroguanosine
  modified_base 8: mod_base = cm
  modified_base 9: mod_base = OTHER; note = 2'-fluorocytidine
  modified_base 10: mod_base = OTHER; note = 2'-fluorocytidine
  modified_base 11: mod_base = OTHER; note = 2'-fluoroadenosine
  modified_base 12: mod_base = OTHER; note = 2'-O-methyladenosine
  modified_base 13: mod_base = gm
  modified_base 14: mod_base = um
  modified_base 15: mod_base = gm
  modified_base 16: mod_base = OTHER; note = 2'-O-methyladenosine
  modified_base 17: mod_base = cm
  modified_base 18: mod_base = um
  modified_base 19: mod_base = OTHER; note = 2'-O-methylguanosine with a 3'-phosphorothioate linkage
  modified_base 20: mod_base = OTHER; note = 2'-O-methyladenosine with a 3'-phosphorothioate linkage
  modified_base 21: mod_base = OTHER; note = 2'-O-methyladenosine with a 3'-phosphate substitution
gttaatgcccaagtgactgaa

SEQ ID NO: 530 - RNA, 23 nt, synthetic construct
  source 1..23: mol_type = other RNA
  modified_base 1: mod_base = OTHER; note = 2'-O-methyluridine with a 3'-phosphorothioate linkage and a 5'-phosphate substitution
  modified_base 2: mod_base = OTHER; note = 2'-fluorouridine with a 3'-phosphorothioate linkage
  modified_base 3: mod_base = cm
  modified_base 4: mod_base = OTHER; note = 2'-O-methyladenosine
  modified_base 5: mod_base = gm
  modified_base 6: mod_base = OTHER; note = 2'-fluorouridine
  modified_base 7: mod_base = cm
  modified_base 8: mod_base = OTHER; note = 2'-O-methyladenosine
  modified_base 9: mod_base = cm
  modified_base 10: mod_base = um
  modified_base 11: mod_base = um
  modified_base 12: mod_base = gm
  modified_base 13: mod_base = gm
  modified_base 14: mod_base = OTHER; note = 2'-fluoroguanosine
  modified_base 15: mod_base = cm
  modified_base 16: mod_base = OTHER; note = 2'-fluoroadenosine
  modified_base 17: mod_base = um
  modified_base 18: mod_base = um
  modified_base 19: mod_base = OTHER; note = 2'-O-methyladenosine
  modified_base 20: mod_base = OTHER; note = 2'-O-methyladenosine
  modified_base 21: mod_base = OTHER; note = 2'-O-methylcytidine with a 3'-phosphorothioate linkage
  modified_base 22: mod_base = OTHER; note = 2'-O-methyladenosine with a 3'-phosphorothioate linkage
  modified_base 23: mod_base = cm
ttcagtcacttgggcattaacac

SEQ ID NO: 531 - RNA, 21 nt, synthetic construct
  source 1..21: mol_type = other RNA
  modified_base 1: mod_base = OTHER; note = 2'-O-methyladenosine with a 3'-phosphorothioate linkage
  modified_base 2: mod_base = OTHER; note = 2'-O-methylcytidine with a 3'-phosphorothioate linkage
  modified_base 3: mod_base = cm
  modified_base 4: mod_base = OTHER; note = 2'-O-methyladenosine
  modified_base 5: mod_base = gm
  modified_base 6: mod_base = OTHER; note = 2'-O-methyladenosine
  modified_base 7: mod_base = OTHER; note = 2'-fluorocytidine
  modified_base 8: mod_base = um
  modified_base 9: mod_base = OTHER; note = 2'-fluoroguanosine
  modified_base 10: mod_base = OTHER; note = 2'-fluorocytidine
  modified_base 11: mod_base = OTHER; note = 2'-fluoroguanosine
  modified_base 12: mod_base = um
  modified_base 13: mod_base = gm
  modified_base 14: mod_base = cm
  modified_base 15: mod_base = cm
  modified_base 16: mod_base = cm
  modified_base 17: mod_base = um
  modified_base 18: mod_base = gm
  modified_base 19: mod_base = OTHER; note = 2'-O-methylcytidine with a 3'-phosphorothioate linkage
  modified_base 20: mod_base = OTHER; note = 2'-O-methylcytidine with a 3'-phosphorothioate linkage
  modified_base 21: mod_base = OTHER; note = 2'-O-methyladenosine with a 3'-phosphate substitution
accagactgcgtgccctgcca

SEQ ID NO: 532 - RNA, 23 nt, synthetic construct
  source 1..23: mol_type = other RNA
  modified_base 1: mod_base = OTHER; note = 2'-O-methyluridine with a 3'-phosphorothioate linkage and a 5'-phosphate substitution
  modified_base 2: mod_base = OTHER; note = 2'-fluoroguanosine with a 3'-phosphorothioate linkage
  modified_base 3: mod_base = gm
  modified_base 4: mod_base = cm
  modified_base 5: mod_base = OTHER; note = 2'-O-methyladenosine
  modified_base 6: mod_base = OTHER; note = 2'-fluoroguanosine
  modified_base 7: mod_base = gm
  modified_base 8: mod_base = gm
  modified_base 9: mod_base = cm
  modified_base 10: mod_base = OTHER; note = 2'-O-methyladenosine
  modified_base 11: mod_base = cm
  modified_base 12: mod_base = gm
  modified_base 13: mod_base = cm
  modified_base 14: mod_base = OTHER; note = 2'-fluoroadenosine
  modified_base 15: mod_base = gm
  modified_base 16: mod_base = OTHER; note = 2'-fluorouridine
  modified_base 17: mod_base = cm
  modified_base 18: mod_base = um
  modified_base 19: mod_base = gm
  modified_base 20: mod_base = gm
  modified_base 21: mod_base = OTHER; note = 2'-O-methyluridine with a 3'-phosphorothioate linkage
  modified_base 22: mod_base = OTHER; note = 2'-O-methyluridine with a 3'-phosphorothioate linkage
  modified_base 23: mod_base = cm
tggcagggcacgcagtctggttc

SEQ ID NO: 533 - RNA, 21 nt, synthetic construct
  source 1..21: mol_type = other RNA
  modified_base 1: mod_base = OTHER; note = 2'-O-methyladenosine with a 3'-phosphorothioate linkage
  modified_base 2: mod_base = OTHER; note = 2'-O-methyladenosine with a 3'-phosphorothioate linkage
  modified_base 3: mod_base = cm
  modified_base 4: mod_base = OTHER; note = 2'-O-methyladenosine
  modified_base 5: mod_base = cm
  modified_base 6: mod_base = um
  modified_base 7: mod_base = OTHER; note = 2'-fluoroguanosine
  modified_base 8: mod_base = um
  modified_base 9: mod_base = OTHER; note = 2'-fluoroguanosine
  modified_base 10: mod_base = OTHER; note = 2'-fluoroadenosine
  modified_base 11: mod_base = OTHER; note = 2'-fluorocytidine
  modified_base 12: mod_base = cm
  modified_base 13: mod_base = cm
  modified_base 14: mod_base = um
  modified_base 15: mod_base = um
  modified_base 16: mod_base = gm
  modified_base 17: mod_base = cm
  modified_base 18: mod_base = OTHER; note = 2'-O-methyladenosine
  modified_base 19: mod_base = OTHER; note = 2'-O-methylcytidine with a 3'-phosphorothioate linkage
  modified_base 20: mod_base = OTHER; note = 2'-O-methylcytidine with a 3'-phosphorothioate linkage
  modified_base 21: mod_base = OTHER; note = 2'-O-methyladenosine with a 3'-phosphate substitution
aacactgtgacccttgcacca

SEQ ID NO: 534 - RNA, 23 nt, synthetic construct
  source 1..23: mol_type = other RNA
  modified_base 1: mod_base = OTHER; note = 2'-O-methyluridine with a 3'-phosphorothioate linkage and a 5'-phosphate substitution
  modified_base 2: mod_base = OTHER; note = 2'-fluoroguanosine with a 3'-phosphorothioate linkage
  modified_base 3: mod_base = gm
  modified_base 4: mod_base = um
  modified_base 5: mod_base = gm
  modified_base 6: mod_base = OTHER; note = 2'-fluorocytidine
  modified_base 7: mod_base = OTHER; note = 2'-O-methyladenosine
  modified_base 8: mod_base = OTHER; note = 2'-O-methyladenosine
  modified_base 9: mod_base = gm
  modified_base 10: mod_base = gm
  modified_base 11: mod_base = gm
  modified_base 12: mod_base = um
  modified_base 13: mod_base = cm
  modified_base 14: mod_base = OTHER; note = 2'-fluoroadenosine
  modified_base 15: mod_base = cm
  modified_base 16: mod_base = OTHER; note = 2'-fluoroadenosine
  modified_base 17: mod_base = gm
  modified_base 18: mod_base = um
  modified_base 19: mod_base = gm
  modified_base 20: mod_base = um
  modified_base 21: mod_base = OTHER; note = 2'-O-methyluridine with a 3'-phosphorothioate linkage
  modified_base 22: mod_base = OTHER; note = 2'-O-methylcytidine with a 3'-phosphorothioate linkage
  modified_base 23: mod_base = OTHER; note = 2'-O-methyladenosine
tggtgcaagggtcacagtgttca

SEQ ID NO: 535 - RNA, 21 nt, synthetic construct
  source 1..21: mol_type = other RNA
  modified_base 1: mod_base = OTHER; note = 2'-O-methylguanosine with a 3'-phosphorothioate linkage
  modified_base 2: mod_base = OTHER; note = 2'-O-methylguanosine with a 3'-phosphorothioate linkage
  modified_base 3: mod_base = OTHER; note = 2'-O-methyladenosine
  modified_base 4: mod_base = OTHER; note = 2'-O-methyladenosine
  modified_base 5: mod_base = gm
  modified_base 6: mod_base = gm
  modified_base 7: mod_base = OTHER; note = 2'-fluoroadenosine
  modified_base 8: mod_base = gm
  modified_base 9: mod_base = OTHER; note = 2'-fluorouridine
  modified_base 10: mod_base = OTHER; note = 2'-fluoroadenosine
  modified_base 11: mod_base = OTHER; note = 2'-fluorocytidine
  modified_base 12: mod_base = OTHER; note = 2'-O-methyladenosine
  modified_base 13: mod_base = cm
  modified_base 14: mod_base = OTHER; note = 2'-O-methyladenosine
  modified_base 15: mod_base = gm
  modified_base 16: mod_base = OTHER; note = 2'-O-methyladenosine
  modified_base 17: mod_base = cm
  modified_base 18: mod_base = OTHER; note = 2'-O-methyladenosine
  modified_base 19: mod_base = OTHER; note = 2'-O-methyladenosine with a 3'-phosphorothioate linkage
  modified_base 20: mod_base = OTHER; note = 2'-O-methyladenosine with a 3'-phosphorothioate linkage
  modified_base 21: mod_base = OTHER; note = 2'-O-methyladenosine with a 3'-phosphate substitution
ggaaggagtacacagacaaaa

SEQ ID NO: 536 - RNA, 23 nt, synthetic construct
  source 1..23: mol_type = other RNA
  modified_base 1: mod_base = OTHER; note = 2'-O-methyluridine with a 3'-phosphorothioate linkage and a 5'-phosphate substitution
  modified_base 2: mod_base = OTHER; note = 2'-fluorouridine with a 3'-phosphorothioate linkage
  modified_base 3: mod_base = um
  modified_base 4: mod_base = um
  modified_base 5: mod_base = gm
  modified_base 6: mod_base = OTHER; note = 2'-fluorouridine
  modified_base 7: mod_base = cm
  modified_base 8: mod_base = um
  modified_base 9: mod_base = gm
  modified_base 10: mod_base = um
  modified_base 11: mod_base = gm
  modified_base 12: mod_base = um
  modified_base 13: mod_base = OTHER; note = 2'-O-methyladenosine
  modified_base 14: mod_base = OTHER; note = 2'-fluorocytidine
  modified_base 15: mod_base = um
  modified_base 16: mod_base = OTHER; note = 2'-fluorocytidine
  modified_base 17: mod_base = cm
  modified_base 18: mod_base = um
  modified_base 19: mod_base = um
  modified_base 20: mod_base = cm
  modified_base 21: mod_base = OTHER; note = 2'-O-methylcytidine with a 3'-phosphorothioate linkage
  modified_base 22: mod_base = OTHER; note = 2'-O-methylcytidine with a 3'-phosphorothioate linkage
  modified_base 23: mod_base = um
ttttgtctgtgtactccttccct

SEQ ID NO: 537 - RNA, 21 nt, synthetic construct
  source 1..21: mol_type = other RNA
  modified_base 1: mod_base = OTHER; note = 2'-O-methylguanosine with a 3'-phosphorothioate linkage
  modified_base 2: mod_base = OTHER; note = 2'-O-methylguanosine with a 3'-phosphorothioate linkage
  modified_base 3: mod_base = gm
  modified_base 4: mod_base = OTHER; note = 2'-O-methyladenosine
  modified_base 5: mod_base = um
  modified_base 6: mod_base = gm
  modified_base 7: mod_base = OTHER; note = 2'-fluoroadenosine
  modified_base 8: mod_base = OTHER; note = 2'-O-methyladenosine
  modified_base 9: mod_base = OTHER; note = 2'-fluorocytidine
  modified_base 10: mod_base = OTHER; note = 2'-fluorocytidine
  modified_base 11: mod_base = OTHER; note = 2'-fluoroadenosine
  modified_base 12: mod_base = gm
  modified_base 13: mod_base = OTHER; note = 2'-O-methyladenosine
  modified_base 14: mod_base = cm
  modified_base 15: mod_base = um
  modified_base 16: mod_base = gm
  modified_base 17: mod_base = cm
  modified_base 18: mod_base = gm
  modified_base 19: mod_base = OTHER; note = 2'-O-methyluridine with a 3'-phosphorothioate linkage
  modified_base 20: mod_base = OTHER; note = 2'-O-methylguanosine with a 3'-phosphorothioate linkage
  modified_base 21: mod_base = OTHER; note = 2'-O-methyladenosine with a 3'-phosphate substitution
gggatgaaccagactgcgtga

SEQ ID NO: 538 - RNA, 23 nt, synthetic construct
  source 1..23: mol_type = other RNA
  modified_base 1: mod_base = OTHER; note = 2'-O-methyluridine with a 3'-phosphorothioate linkage and a 5'-phosphate substitution
  modified_base 2: mod_base = OTHER; note = 2'-fluorocytidine with a 3'-phosphorothioate linkage
  modified_base 3: mod_base = OTHER; note = 2'-O-methyladenosine
  modified_base 4: mod_base = cm
  modified_base 5: mod_base = gm
  modified_base 6: mod_base = OTHER; note = 2'-fluorocytidine
  modified_base 7: mod_base = OTHER; note = 2'-O-methyladenosine
  modified_base 8: mod_base = gm
  modified_base 9: mod_base = um
  modified_base 10: mod_base = cm
  modified_base 11: mod_base = um
  modified_base 12: mod_base = gm
  modified_base 13: mod_base = gm
  modified_base 14: mod_base = OTHER; note = 2'-fluorouridine
  modified_base 15: mod_base = um
  modified_base 16: mod_base = OTHER; note = 2'-fluorocytidine
  modified_base 17: mod_base = OTHER; note = 2'-O-methyladenosine
  modified_base 18: mod_base = um
  modified_base 19: mod_base = cm
  modified_base 20: mod_base = cm
  modified_base 21: mod_base = OTHER; note = 2'-O-methylcytidine with a 3'-phosphorothioate linkage
  modified_base 22: mod_base = OTHER; note = 2'-O-methylcytidine with a 3'-phosphorothioate linkage
  modified_base 23: mod_base = OTHER; note = 2'-O-methyladenosine
tcacgcagtctggttcatcccca

SEQ ID NO: 539 - RNA, 21 nt, synthetic construct
  source 1..21: mol_type = other RNA
  modified_base 1: mod_base = OTHER; note = 2'-O-methylcytidine with a 3'-phosphorothioate linkage
  modified_base 2: mod_base = OTHER; note = 2'-O-methyluridine with a 3'-phosphorothioate linkage
  modified_base 3: mod_base = gm
  modified_base 4: mod_base = cm
  modified_base 5: mod_base = gm
  modified_base 6: mod_base = um
  modified_base 7: mod_base = OTHER; note = 2'-fluoroguanosine
  modified_base 8: mod_base = cm
  modified_base 9: mod_base = OTHER; note = 2'-fluorocytidine
  modified_base 10: mod_base = OTHER; note = 2'-fluorocytidine
  modified_base 11: mod_base = OTHER; note = 2'-fluorouridine
  modified_base 12: mod_base = gm
  modified_base 13: mod_base = cm
  modified_base 14: mod_base = cm
  modified_base 15: mod_base = OTHER; note = 2'-O-methyladenosine
  modified_base 16: mod_base = OTHER; note = 2'-O-methyladenosine
  modified_base 17: mod_base = gm
  modified_base 18: mod_base = OTHER; note = 2'-O-methyladenosine
  modified_base 19: mod_base = OTHER; note = 2'-O-methyladenosine with a 3'-phosphorothioate linkage
  modified_base 20: mod_base = OTHER; note = 2'-O-methylguanosine with a 3'-phosphorothioate linkage
  modified_base 21: mod_base = OTHER; note = 2'-O-methyladenosine with a 3'-phosphate substitution
ctgcgtgccctgccaagaaga

SEQ ID NO: 540 - RNA, 23 nt, synthetic construct
  source 1..23: mol_type = other RNA
  modified_base 1: mod_base = OTHER; note = 2'-O-methyluridine with a 3'-phosphorothioate linkage and a 5'-phosphate substitution
  modified_base 2: mod_base = OTHER; note = 2'-fluorocytidine with a 3'-phosphorothioate linkage
  modified_base 3: mod_base = um
  modified_base 4: mod_base = um
  modified_base 5: mod_base = cm
  modified_base 6: mod_base = OTHER; note = 2'-fluorouridine
  modified_base 7: mod_base = um
  modified_base 8: mod_base = gm
  modified_base 9: mod_base = gm
  modified_base 10: mod_base = cm
  modified_base 11: mod_base = OTHER; note = 2'-O-methyladenosine
  modified_base 12: mod_base = gm
  modified_base 13: mod_base = gm
  modified_base 14: mod_base = OTHER; note = 2'-fluoroguanosine
  modified_base 15: mod_base = cm
  modified_base 16: mod_base = OTHER; note = 2'-fluoroadenosine
  modified_base 17: mod_base = cm
  modified_base 18: mod_base = gm
  modified_base 19: mod_base = cm
  modified_base 20: mod_base = OTHER; note = 2'-O-methyladenosine
  modified_base 21: mod_base = OTHER; note = 2'-O-methylguanosine with a 3'-phosphorothioate linkage
  modified_base 22: mod_base = OTHER; note = 2'-O-methyluridine with a 3'-phosphorothioate linkage
  modified_base 23: mod_base = cm
tcttcttggcagggcacgcagtc

SEQ ID NO: 541 - RNA, 21 nt, synthetic construct
  source 1..21: mol_type = other RNA
  modified_base 1: mod_base = OTHER; note = 2'-O-methyluridine with a 3'-phosphorothioate linkage
  modified_base 2: mod_base = OTHER; note = 2'-O-methylguanosine with a 3'-phosphorothioate linkage
  modified_base 3: mod_base = OTHER; note = 2'-O-methyladenosine
  modified_base 4: mod_base = OTHER; note = 2'-O-methyladenosine
  modified_base 5: mod_base = cm
  modified_base 6: mod_base = OTHER; note = 2'-O-methyladenosine
  modified_base 7: mod_base = OTHER; note = 2'-fluorocytidine
  modified_base 8: mod_base = um
  modified_base 9: mod_base = OTHER; note = 2'-fluoroguanosine
  modified_base 10: mod_base = OTHER; note = 2'-fluorouridine
  modified_base 11: mod_base = OTHER; note = 2'-fluoroguanosine
  modified_base 12: mod_base = OTHER; note = 2'-O-methyladenosine
  modified_base 13: mod_base = cm
  modified_base 14: mod_base = cm
  modified_base 15: mod_base = cm
  modified_base 16: mod_base = um
  modified_base 17: mod_base = um
  modified_base 18: mod_base = gm
  modified_base 19: mod_base = OTHER; note = 2'-O-methylcytidine with a 3'-phosphorothioate linkage
  modified_base 20: mod_base = OTHER; note = 2'-O-methyladenosine with a 3'-phosphorothioate linkage
  modified_base 21: mod_base = OTHER; note = 2'-O-methyladenosine with a 3'-phosphate substitution
tgaacactgtgacccttgcaa

SEQ ID NO: 542 - RNA, 23 nt, synthetic construct
  source 1..23: mol_type = other RNA
  modified_base 1: mod_base = OTHER; note = 2'-O-methyluridine with a 3'-phosphorothioate linkage and a 5'-phosphate substitution
  modified_base 2: mod_base = OTHER; note = 2'-fluorouridine with a 3'-phosphorothioate linkage
  modified_base 3: mod_base = gm
  modified_base 4: mod_base = cm
  modified_base 5: mod_base = OTHER; note = 2'-O-methyladenosine
  modified_base 6: mod_base = OTHER; note = 2'-fluoroadenosine
  modified_base 7: mod_base = gm
  modified_base 8: mod_base = gm
  modified_base 9: mod_base = gm
  modified_base 10: mod_base = um
  modified_base 11: mod_base = cm
  modified_base 12: mod_base = OTHER; note = 2'-O-methyladenosine
  modified_base 13: mod_base = cm
  modified_base 14: mod_base = OTHER; note = 2'-fluoroadenosine
  modified_base 15: mod_base = gm
  modified_base 16: mod_base = OTHER; note = 2'-fluorouridine
  modified_base 17: mod_base = gm
  modified_base 18: mod_base = um
  modified_base 19: mod_base = um
  modified_base 20: mod_base = cm
  modified_base 21: mod_base = OTHER; note = 2'-O-methyladenosine with a 3'-phosphorothioate linkage
  modified_base 22: mod_base = OTHER; note = 2'-O-methylcytidine with a 3'-phosphorothioate linkage
  modified_base 23: mod_base = OTHER; note = 2'-O-methyladenosine
ttgcaagggtcacagtgttcaca

SEQ ID NO: 543 - RNA, 21 nt, synthetic construct
  source 1..21: mol_type = other RNA
  modified_base 1: mod_base = OTHER; note = 2'-O-methyladenosine with a 3'-phosphorothioate linkage
  modified_base 2: mod_base = OTHER; note = 2'-O-methylguanosine with a 3'-phosphorothioate linkage
  modified_base 3: mod_base = gm
  modified_base 4: mod_base = OTHER; note = 2'-O-methyladenosine
  modified_base 5: mod_base = um
  modified_base 6: mod_base = um
  modified_base 7: mod_base = OTHER; note = 2'-fluoroguanosine
  modified_base 8: mod_base = cm
  modified_base 9: mod_base = OTHER; note = 2'-fluorouridine
  modified_base 10: mod_base = OTHER; note = 2'-fluorocytidine
  modified_base 11: mod_base = OTHER; note = 2'-fluoroadenosine
  modified_base 12: mod_base = OTHER; note = 2'-O-methyladenosine
  modified_base 13: mod_base = cm
  modified_base 14: mod_base = OTHER; note = 2'-O-methyladenosine
  modified_base 15: mod_base = OTHER; note = 2'-O-methyladenosine
  modified_base 16: mod_base = cm
  modified_base 17: mod_base = cm
  modified_base 18: mod_base = OTHER; note = 2'-O-methyladenosine
  modified_base 19: mod_base = OTHER; note = 2'-O-methyluridine with a 3'-phosphorothioate linkage
  modified_base 20: mod_base = OTHER; note = 2'-O-methylguanosine with a 3'-phosphorothioate linkage
  modified_base 21: mod_base = OTHER; note = 2'-O-methyladenosine with a 3'-phosphate substitution
aggattgctcaacaaccatga

SEQ ID NO: 544 - RNA, 23 nt, synthetic construct
  source 1..23: mol_type = other RNA
  modified_base 1: mod_base = OTHER; note = 2'-O-methyluridine with a 3'-phosphorothioate linkage and a 5'-phosphate substitution
  modified_base 2: mod_base = OTHER; note = 2'-fluorocytidine with a 3'-phosphorothioate linkage
  modified_base 3: mod_base = OTHER; note = 2'-O-methyladenosine
  modified_base 4: mod_base = um
  modified_base 5: mod_base = gm
  modified_base 6: mod_base = OTHER; note = 2'-fluoroguanosine
  modified_base 7: mod_base = um
  modified_base 8: mod_base = um
  modified_base 9: mod_base = gm
  modified_base 10: mod_base = um
  modified_base 11: mod_base = um
  modified_base 12: mod_base = gm
  modified_base 13: mod_base = OTHER; note = 2'-O-methyladenosine
  modified_base 14: mod_base = OTHER; note = 2'-fluoroguanosine
  modified_base 15: mod_base = cm
  modified_base 16: mod_base = OTHER; note = 2'-fluoroadenosine
  modified_base 17: mod_base = OTHER; note = 2'-O-methyladenosine
  modified_base 18: mod_base = um
  modified_base 19: mod_base = cm
  modified_base 20: mod_base = cm
  modified_base 21: mod_base = OTHER; note = 2'-O-methyluridine with a 3'-phosphorothioate linkage
  modified_base 22: mod_base = OTHER; note = 2'-O-methylcytidine with a 3'-phosphorothioate linkage
  modified_base 23: mod_base = cm
tcatggttgttgagcaatcctcc

SEQ ID NO: 545 - RNA, 21 nt, synthetic construct
  source 1..21: mol_type = other RNA
  modified_base 1: mod_base = OTHER; note = 2'-O-methyluridine with a 3'-phosphorothioate linkage
  modified_base 2: mod_base = OTHER; note = 2'-O-methylguanosine with a 3'-phosphorothioate linkage
  modified_base 3: mod_base = OTHER; note = 2'-O-methyladenosine
  modified_base 4: mod_base = cm
  modified_base 5: mod_base = OTHER; note = 2'-O-methyladenosine
  modified_base 6: mod_base = cm
  modified_base 7: mod_base = OTHER; note = 2'-fluorouridine
  modified_base 8: mod_base = OTHER; note = 2'-O-methyladenosine
  modified_base 9: mod_base = OTHER; note = 2'-fluoroadenosine
  modified_base 10: mod_base = OTHER; note = 2'-fluoroguanosine
  modified_base 11: mod_base = OTHER; note = 2'-fluorouridine
  modified_base 12: mod_base = cm
  modified_base 13: mod_base = OTHER; note = 2'-O-methyladenosine
  modified_base 14: mod_base = OTHER; note = 2'-O-methyladenosine
  modified_base 15: mod_base = gm
  modified_base 16: mod_base = um
  modified_base 17: mod_base = um
  modified_base 18: mod_base = OTHER; note = 2'-O-methyladenosine
  modified_base 19: mod_base = OTHER; note = 2'-O-methyladenosine with a 3'-phosphorothioate linkage
  modified_base 20: mod_base = OTHER; note = 2'-O-methyladenosine with a 3'-phosphorothioate linkage
  modified_base 21: mod_base = OTHER; note = 2'-O-methyladenosine with a 3'-phosphate substitution
tgacactaagtcaagttaaaa

SEQ ID NO: 546 - RNA, 23 nt, synthetic construct
  source 1..23: mol_type = other RNA
  modified_base 1: mod_base = OTHER; note = 2'-O-methyluridine with a 3'-phosphorothioate linkage and a 5'-phosphate substitution
  modified_base 2: mod_base = OTHER; note = 2'-fluorouridine with a 3'-phosphorothioate linkage
  modified_base 3: mod_base = um
  modified_base 4: mod_base = um
  modified_base 5: mod_base = OTHER; note = 2'-O-methyladenosine
  modified_base 6: mod_base = OTHER; note = 2'-fluoroadenosine
  modified_base 7: mod_base = cm
  modified_base 8: mod_base = um
  modified_base 9: mod_base = um
  modified_base 10: mod_base = gm
  modified_base 11: mod_base = OTHER; note = 2'-O-methyladenosine
  modified_base 12: mod_base = cm
  modified_base 13: mod_base = um
  modified_base 14: mod_base = OTHER; note = 2'-fluorouridine
  modified_base 15: mod_base = OTHER; note = 2'-O-methyladenosine
  modified_base 16: mod_base = OTHER; note = 2'-fluoroguanosine
  modified_base 17: mod_base = um
  modified_base 18: mod_base = gm
  modified_base 19: mod_base = um
  modified_base 20: mod_base = cm
  modified_base 21: mod_base = OTHER; note = 2'-O-methyladenosine with a 3'-phosphorothioate linkage
  modified_base 22: mod_base = OTHER; note = 2'-O-methyluridine with a 3'-phosphorothioate linkage
  modified_base 23: mod_base = gm
ttttaacttgacttagtgtcatg

SEQ ID NO: 547 - RNA, 21 nt, synthetic construct
  source 1..21: mol_type = other RNA
  modified_base 1: mod_base = OTHER; note = 2'-O-methyluridine with a 3'-phosphorothioate linkage
  modified_base 2: mod_base = OTHER; note = 2'-O-methylguanosine with a 3'-phosphorothioate linkage
  modified_base 3: mod_base = OTHER; note = 2'-O-methyladenosine
  modified_base 4: mod_base = OTHER; note = 2'-O-methyladenosine
  modified_base 5: mod_base = OTHER; note = 2'-O-methyladenosine
  modified_base 6: mod_base = gm
  modified_base 7: mod_base = OTHER; note = 2'-fluoroguanosine
  modified_base 8: mod_base = OTHER; note = 2'-O-methyladenosine
  modified_base 9: mod_base = OTHER; note = 2'-fluoroadenosine
  modified_base 10: mod_base = OTHER; note = 2'-fluoroadenosine
  modified_base 11: mod_base = OTHER; note = 2'-fluoroguanosine
  modified_base 12: mod_base = cm
  modified_base 13: mod_base = um
  modified_base 14: mod_base = OTHER; note = 2'-O-methyladenosine
  modified_base 15: mod_base = gm
  modified_base 16: mod_base = gm
  modified_base 17: mod_base = gm
  modified_base 18: mod_base = OTHER; note = 2'-O-methyladenosine
  modified_base 19: mod_base = OTHER; note = 2'-O-methylcytidine with a 3'-phosphorothioate linkage
  modified_base 20: mod_base = OTHER; note = 2'-O-methyluridine with a 3'-phosphorothioate linkage
  modified_base 21: mod_base = OTHER; note = 2'-O-methyladenosine with a 3'-phosphate substitution
tgaaaggaaagctagggacta

SEQ ID NO: 548 - RNA, 23 nt, synthetic construct
  source 1..23: mol_type = other RNA
  modified_base 1: mod_base = OTHER; note = 2'-O-methyluridine with a 3'-phosphorothioate linkage and a 5'-phosphate substitution
  modified_base 2: mod_base = OTHER; note = 2'-fluoroadenosine with a 3'-phosphorothioate linkage
  modified_base 3: mod_base = gm
  modified_base 4: mod_base = um
  modified_base 5: mod_base = cm
  modified_base 6: mod_base = OTHER; note = 2'-fluorocytidine
  modified_base 7: mod_base = cm
  modified_base 8: mod_base = um
  modified_base 9: mod_base = OTHER; note = 2'-O-methyladenosine
  modified_base 10: mod_base = gm
  modified_base 11: mod_base = cm
  modified_base 12: mod_base = um
  modified_base 13: mod_base = um
  modified_base 14: mod_base = OTHER; note = 2'-fluorouridine
  modified_base 15: mod_base = cm
  modified_base 16: mod_base = OTHER; note = 2'-fluorocytidine
  modified_base 17: mod_base = um
  modified_base 18: mod_base = um
  modified_base 19: mod_base = um
  modified_base 20: mod_base = cm
  modified_base 21: mod_base = OTHER; note = 2'-O-methyladenosine with a 3'-phosphorothioate linkage
  modified_base 22: mod_base = OTHER; note = 2'-O-methylcytidine with a 3'-phosphorothioate linkage
  modified_base 23: mod_base = cm
tagtccctagctttcctttcacc

SEQ ID NO: 549 - RNA, 21 nt, synthetic construct
  source 1..21: mol_type = other RNA
  modified_base 1: mod_base = OTHER; note = 2'-O-methyladenosine with a 3'-phosphorothioate linkage
  modified_base 2: mod_base = OTHER; note = 2'-O-methylcytidine with a 3'-phosphorothioate linkage
  modified_base 3: mod_base = OTHER; note = 2'-O-methyladenosine
  modified_base 4: mod_base = OTHER; note = 2'-O-methyladenosine
  modified_base 5: mod_base = um
  modified_base 6: mod_base = gm
  modified_base 7: mod_base = OTHER; note = 2'-fluorouridine
  modified_base 8: mod_base = cm
  modified_base 9: mod_base = OTHER; note = 2'-fluorocytidine
  modified_base 10: mod_base = OTHER; note = 2'-fluoroadenosine
  modified_base 11: mod_base = OTHER; note = 2'-fluoroadenosine
  modified_base 12: mod_base = gm
  modified_base 13: mod_base = OTHER; note = 2'-O-methyladenosine
  modified_base 14: mod_base = cm
  modified_base 15: mod_base = OTHER; note = 2'-O-methyladenosine
  modified_base 16: mod_base = cm
  modified_base 17: mod_base = OTHER; note = 2'-O-methyladenosine
  modified_base 18: mod_base = gm
  modified_base 19: mod_base = OTHER; note = 2'-O-methylcytidine with a 3'-phosphorothioate linkage
  modified_base 20: mod_base = OTHER; note = 2'-O-methyladenosine with a 3'-phosphorothioate linkage
  modified_base 21: mod_base = OTHER; note = 2'-O-methyladenosine with a 3'-phosphate substitution
acaatgtccaagacacagcaa

SEQ ID NO: 550 - RNA, 23 nt, synthetic construct
  source 1..23: mol_type = other RNA
  modified_base 1: mod_base = OTHER; note = 2'-O-methyluridine with a 3'-phosphorothioate linkage and a 5'-phosphate substitution
  modified_base 2: mod_base = OTHER; note = 2'-fluorouridine with a 3'-phosphorothioate linkage
  modified_base 3: mod_base = gm
  modified_base 4: mod_base = cm
  modified_base 5: mod_base = um
  modified_base 6: mod_base = OTHER; note = 2'-fluoroguanosine
  modified_base 7: mod_base = um
  modified_base 8: mod_base = gm
  modified_base 9: mod_base = um
  modified_base 10: mod_base = cm
  modified_base 11: mod_base = um
  modified_base 12: mod_base = um
  modified_base 13: mod_base = gm
  modified_base 14: mod_base = OTHER; note = 2'-fluoroguanosine
  modified_base 15: mod_base = OTHER; note = 2'-O-methyladenosine
  modified_base 16: mod_base = OTHER; note = 2'-fluorocytidine
  modified_base 17: mod_base = OTHER; note = 2'-O-methyladenosine
  modified_base 18: mod_base = um
  modified_base 19: mod_base = um
  modified_base 20: mod_base = gm
  modified_base 21: mod_base = OTHER; note = 2'-O-methyluridine with a 3'-phosphorothioate linkage
  modified_base 22: mod_base = OTHER; note = 2'-O-methylcytidine with a 3'-phosphorothioate linkage
  modified_base 23: mod_base = OTHER; note = 2'-O-methyladenosine
ttgctgtgtcttggacattgtca

SEQ ID NO: 551 - RNA, 21 nt, synthetic construct
  source 1..21: mol_type = other RNA
  modified_base 1: mod_base = OTHER; note = 2'-O-methylguanosine with a 3'-phosphorothioate linkage
  modified_base 2: mod_base = OTHER; note = 2'-O-methyluridine with a 3'-phosphorothioate linkage
  modified_base 3: mod_base = gm
  modified_base 4: mod_base = OTHER; note = 2'-O-methyladenosine
  modified_base 5: mod_base = OTHER; note = 2'-O-methyladenosine
  modified_base 6: mod_base = OTHER; note = 2'-O-methyladenosine
  modified_base 7: mod_base = OTHER; note = 2'-fluoroguanosine
  modified_base 8: mod_base = gm
  modified_base 9: mod_base = OTHER; note = 2'-fluoroadenosine
  modified_base 10: mod_base = OTHER; note = 2'-fluoroadenosine
  modified_base 11: mod_base = OTHER; note = 2'-fluoroadenosine
  modified_base 12: mod_base = gm
  modified_base 13: mod_base = cm
  modified_base 14: mod_base = um
  modified_base 15: mod_base = OTHER; note = 2'-O-methyladenosine
  modified_base 16: mod_base = gm
  modified_base 17: mod_base = gm
  modified_base 18: mod_base = gm
  modified_base 19: mod_base = OTHER; note = 2'-O-methyladenosine with a 3'-phosphorothioate linkage
  modified_base 20: mod_base = OTHER; note = 2'-O-methylcytidine with a 3'-phosphorothioate linkage
  modified_base 21: mod_base = OTHER; note = 2'-O-methyladenosine with a 3'-phosphate substitution
gtgaaaggaaagctagggaca

SEQ ID NO: 552 - RNA, 23 nt, synthetic construct
  source 1..23: mol_type = other RNA
  modified_base 1: mod_base = OTHER; note = 2'-O-methyluridine with a 3'-phosphorothioate linkage and a 5'-phosphate substitution
  modified_base 2: mod_base = OTHER; note = 2'-fluoroguanosine with a 3'-phosphorothioate linkage
  modified_base 3: mod_base = um
  modified_base 4: mod_base = cm
  modified_base 5: mod_base = cm
  modified_base 6: mod_base = OTHER; note = 2'-fluorocytidine
  modified_base 7: mod_base = um
  modified_base 8: mod_base = OTHER; note = 2'-O-methyladenosine
  modified_base 9: mod_base = gm
  modified_base 10: mod_base = cm
  modified_base 11: mod_base = um
  modified_base 12: mod_base = um
  modified_base 13: mod_base = um
  modified_base 14: mod_base = OTHER; note = 2'-fluorocytidine
  modified_base 15: mod_base = cm
  modified_base 16: mod_base = OTHER; note = 2'-fluorouridine
  modified_base 17: mod_base = um
  modified_base 18: mod_base = um
  modified_base 19: mod_base = cm
  modified_base 20: mod_base = OTHER; note = 2'-O-methyladenosine
  modified_base 21: mod_base = OTHER; note = 2'-O-methylcytidine with a 3'-phosphorothioate linkage
  modified_base 22: mod_base = OTHER; note = 2'-O-methylcytidine with a 3'-phosphorothioate linkage
  modified_base 23: mod_base = um
tgtccctagctttcctttcacct

SEQ ID NO: 553 - RNA, 21 nt, synthetic construct
  source 1..21: mol_type = other RNA
  modified_base 1: mod_base = OTHER; note = 2'-O-methyladenosine with a 3'-phosphorothioate linkage
  modified_base 2: mod_base = OTHER; note = 2'-O-methylguanosine with a 3'-phosphorothioate linkage
  modified_base 3: mod_base = cm
  modified_base 4: mod_base = um
  modified_base 5: mod_base = cm
  modified_base 6: mod_base = um
  modified_base 7: mod_base = OTHER; note = 2'-fluorouridine
  modified_base 8: mod_base = um
  modified_base 9: mod_base = OTHER; note = 2'-fluorocytidine
  modified_base 10: mod_base = OTHER; note = 2'-fluoroadenosine
  modified_base 11: mod_base = OTHER; note = 2'-fluorocytidine
  modified_base 12: mod_base = um
  modified_base 13: mod_base = um
  modified_base 14: mod_base = cm
  modified_base 15: mod_base = gm
  modified_base 16: mod_base = gm
  modified_base 17: mod_base = OTHER; note = 2'-O-methyladenosine
  modified_base 18: mod_base = gm
  modified_base 19: mod_base = OTHER; note = 2'-O-methylguanosine with a 3'-phosphorothioate linkage
  modified_base 20: mod_base = OTHER; note = 2'-O-methyladenosine with a 3'-phosphorothioate linkage
  modified_base 21: mod_base = OTHER; note = 2'-O-methyladenosine with a 3'-phosphate substitution
agctctttcacttcggaggaa

SEQ ID NO: 554 - RNA, 23 nt, synthetic construct
  source 1..23: mol_type = other RNA
  modified_base 1: mod_base = OTHER; note = 2'-O-methyluridine with a 3'-phosphorothioate linkage and a 5'-phosphate substitution
  modified_base 2: mod_base = OTHER; note = 2'-fluorouridine with a 3'-phosphorothioate linkage
  modified_base 3: mod_base = cm
  modified_base 4: mod_base = cm
  modified_base 5: mod_base = um
  modified_base 6: mod_base = OTHER; note = 2'-fluorocytidine
  modified_base 7: mod_base = cm
  modified_base 8: mod_base = gm
  modified_base 9: mod_base = OTHER; note = 2'-O-methyladenosine
  modified_base 10: mod_base = OTHER; note = 2'-O-methyladenosine
  modified_base 11: mod_base = gm
  modified_base 12: mod_base = um
  modified_base 13: mod_base = gm
  modified_base 14: mod_base = OTHER; note = 2'-fluoroadenosine
  modified_base 15: mod_base = OTHER; note = 2'-O-methyladenosine
  modified_base 16: mod_base = OTHER; note = 2'-fluoroadenosine
  modified_base 17: mod_base = gm
  modified_base 18: mod_base = OTHER; note = 2'-O-methyladenosine
  modified_base 19: mod_base = gm
  modified_base 20: mod_base = cm
  modified_base 21: mod_base = OTHER; note = 2'-O-methyluridine with a 3'-phosphorothioate linkage
  modified_base 22: mod_base = OTHER; note = 2'-O-methyluridine with a 3'-phosphorothioate linkage
  modified_base 23: mod_base = cm
ttcctccgaagtgaaagagcttc

SEQ ID NO: 555 - RNA, 21 nt, synthetic construct
  source 1..21: mol_type = other RNA
  modified_base 1: mod_base = OTHER; note = 2'-O-methyluridine with a 3'-phosphorothioate linkage
  modified_base 2: mod_base = OTHER; note = 2'-O-methyluridine with a 3'-phosphorothioate linkage
  modified_base 3: mod_base = cm
  modified_base 4: mod_base = um
  modified_base 5: mod_base = um
  modified_base 6: mod_base = cm
  modified_base 7: mod_base = OTHER; note = 2'-fluorocytidine
  modified_base 8: mod_base = OTHER; note = 2'-O-methyladenosine
  modified_base 9: mod_base = OTHER; note = 2'-fluoroadenosine
  modified_base 10: mod_base = OTHER; note = 2'-fluoroadenosine
  modified_base 11: mod_base = OTHER; note = 2'-fluorouridine
  modified_base 12: mod_base = gm
  modified_base 13: mod_base = cm
  modified_base 14: mod_base = OTHER; note = 2'-O-methyladenosine
  modified_base 15: mod_base = gm
  modified_base 16: mod_base = OTHER; note = 2'-O-methyladenosine
  modified_base 17: mod_base = OTHER; note = 2'-O-methyladenosine
  modified_base 18: mod_base = gm
  modified_base 19: mod_base = OTHER; note = 2'-O-methyladenosine with a 3'-phosphorothioate linkage
  modified_base 20: mod_base = OTHER; note = 2'-O-methyluridine with a 3'-phosphorothioate linkage
  modified_base 21: mod_base = OTHER; note = 2'-O-methyladenosine with a 3'-phosphate substitution
ttcttccaaatgcagaagata

SEQ ID NO: 556 - RNA, 23 nt, synthetic construct
  source 1..23: mol_type = other RNA
  modified_base 1: mod_base = OTHER; note = 2'-O-methyluridine with a 3'-phosphorothioate linkage and a 5'-phosphate substitution
  modified_base 2: mod_base = OTHER; note = 2'-fluoroadenosine with a 3'-phosphorothioate linkage
  modified_base 3: mod_base = um
  modified_base 4: mod_base = cm
  modified_base 5: mod_base = um
  modified_base 6: mod_base = OTHER; note = 2'-fluorouridine
  modified_base 7: mod_base = cm
  modified_base 8: mod_base = um
  modified_base 9: mod_base = gm
  modified_base 10: mod_base = cm
  modified_base 11: mod_base = OTHER; note = 2'-O-methyladenosine
  modified_base 12: mod_base = um
  modified_base 13: mod_base = um
  modified_base 14: mod_base = OTHER; note = 2'-fluorouridine
  modified_base 15: mod_base = gm
  modified_base 16: mod_base = OTHER; note = 2'-fluoroguanosine
  modified_base 17: mod_base = OTHER; note = 2'-O-methyladenosine
  modified_base 18: mod_base = OTHER; note = 2'-O-methyladenosine
  modified_base 19: mod_base = gm
  modified_base 20: mod_base = OTHER; note = 2'-O-methyladenosine
  modified_base 21: mod_base = OTHER; note = 2'-O-methyladenosine with a 3'-phosphorothioate linkage
  modified_base 22: mod_base = OTHER; note = 2'-O-methyladenosine with a 3'-phosphorothioate linkage
  modified_base 23: mod_base = OTHER; note = 2'-O-methyladenosine
tatcttctgcatttggaagaaaa

SEQ ID NO: 557 - RNA, 21 nt, synthetic construct
  source 1..21: mol_type = other RNA
  modified_base 1: mod_base = OTHER; note = 2'-O-methylguanosine with a 3'-phosphorothioate linkage
  modified_base 2: mod_base = OTHER; note = 2'-O-methylguanosine with a 3'-phosphorothioate linkage
  modified_base 3: mod_base = OTHER; note = 2'-O-methyladenosine
  modified_base 4: mod_base = gm
  modified_base 5: mod_base = gm
  modified_base 6: mod_base = OTHER; note = 2'-O-methyladenosine
  modified_base 7: mod_base = OTHER; note = 2'-fluorouridine
  modified_base 8: mod_base = um
  modified_base 9: mod_base = OTHER; note = 2'-fluoroguanosine
  modified_base 10: mod_base = OTHER; note = 2'-fluorocytidine
  modified_base 11: mod_base = OTHER; note = 2'-fluorouridine
  modified_base 12: mod_base = cm
  modified_base 13: mod_base = OTHER; note = 2'-O-methyladenosine
  modified_base 14: mod_base = OTHER; note = 2'-O-methyladenosine
  modified_base 15: mod_base = cm
  modified_base 16: mod_base = OTHER; note = 2'-O-methyladenosine
  modified_base 17: mod_base = OTHER; note = 2'-O-methyladenosine
  modified_base 18: mod_base = cm
  modified_base 19: mod_base = OTHER; note = 2'-O-methylcytidine with a 3'-phosphorothioate linkage
  modified_base 20: mod_base = OTHER; note = 2'-O-methyladenosine with a 3'-phosphorothioate linkage
  modified_base 21: mod_base = OTHER; note = 2'-O-methyladenosine with a 3'-phosphate substitution
ggaggattgctcaacaaccaa

SEQ ID NO: 558 - RNA, 23 nt, synthetic construct
  source 1..23: mol_type = other RNA
  modified_base 1: mod_base = OTHER; note = 2'-O-methyluridine with a 3'-phosphorothioate linkage and a 5'-phosphate substitution
  modified_base 2: mod_base = OTHER; note = 2'-fluorouridine with a 3'-phosphorothioate linkage
  modified_base 3: mod_base = gm
  modified_base 4: mod_base = gm
  modified_base 5: mod_base = um
  modified_base 6: mod_base = OTHER; note = 2'-fluorouridine
  modified_base 7: mod_base = gm
  modified_base 8: mod_base = um
  modified_base 9: mod_base = um
  modified_base 10: mod_base = gm
  modified_base 11: mod_base = OTHER; note = 2'-O-methyladenosine
  modified_base 12: mod_base = gm
  modified_base 13: mod_base = cm
  modified_base 14: mod_base = OTHER; note = 2'-fluoroadenosine
  modified_base 15: mod_base = OTHER; note = 2'-O-methyladenosine
  modified_base 16: mod_base = OTHER; note = 2'-fluorouridine
  modified_base 17: mod_base = cm
  modified_base 18: mod_base = cm
  modified_base 19: mod_base = um
  modified_base 20: mod_base = cm
  modified_base 21: mod_base = OTHER; note = 2'-O-methylcytidine with a 3'-phosphorothioate linkage
  modified_base 22: mod_base = OTHER; note = 2'-O-methylguanosine with a 3'-phosphorothioate linkage
  modified_base 23: mod_base = OTHER; note = 2'-O-methyladenosine
ttggttgttgagcaatcctccga

SEQ ID NO: 559 - RNA, 21 nt, synthetic construct
  source 1..21: mol_type = other RNA
  modified_base 1: mod_base = OTHER; note = 2'-O-methyluridine with a 3'-phosphorothioate linkage
  modified_base 2: mod_base = OTHER; note = 2'-O-methylguanosine with a 3'-phosphorothioate linkage
  modified_base 3: mod_base = cm
  modified_base 4: mod_base = cm
  modified_base 5: mod_base = OTHER; note = 2'-O-methyladenosine
  modified_base 6: mod_base = OTHER; note = 2'-O-methyladenosine
  modified_base 7: mod_base = OTHER; note = 2'-fluoroguanosine
  modified_base 8: mod_base = OTHER; note = 2'-O-methyladenosine
  modified_base 9: mod_base = OTHER; note = 2'-fluoroadenosine
  modified_base 10: mod_base = OTHER; note = 2'-fluoroguanosine
  modified_base 11: mod_base = OTHER; note = 2'-fluoroguanosine
  modified_base 12: mod_base = gm
  modified_base 13: mod_base = OTHER; note = 2'-O-methyladenosine
  modified_base 14: mod_base = OTHER; note = 2'-O-methyladenosine
  modified_base 15: mod_base = gm
  modified_base 16: mod_base = gm
  modified_base 17: mod_base = OTHER; note = 2'-O-methyladenosine
  modified_base 18: mod_base = gm
  modified_base 19: mod_base = OTHER; note = 2'-O-methyluridine with a 3'-phosphorothioate linkage
  modified_base 20: mod_base = OTHER; note = 2'-O-methyladenosine with a 3'-phosphorothioate linkage
  modified_base 21: mod_base = OTHER; note = 2'-O-methyladenosine with a 3'-phosphate substitution
tgccaagaagggaaggagtaa

SEQ ID NO: 560 - RNA, 23 nt, synthetic construct
  source 1..23: mol_type = other RNA
  modified_base 1: mod_base = OTHER; note = 2'-O-methyluridine with a 3'-phosphorothioate linkage and a 5'-phosphate substitution
  modified_base 2: mod_base = OTHER; note = 2'-fluorouridine with a 3'-phosphorothioate linkage
  modified_base 3: mod_base = OTHER; note = 2'-O-methyladenosine
  modified_base 4: mod_base = cm
  modified_base 5: mod_base = um
  modified_base 6: mod_base = OTHER; note = 2'-fluorocytidine
  modified_base 7: mod_base = cm
  modified_base 8: mod_base = um
  modified_base 9: mod_base = um
  modified_base 10: mod_base = cm
  modified_base 11: mod_base = cm
  modified_base 12: mod_base = cm
  modified_base 13: mod_base = um
  modified_base 14: mod_base = OTHER; note = 2'-fluorouridine
  modified_base 15: mod_base = cm
  modified_base 16: mod_base = OTHER; note = 2'-fluorouridine
  modified_base 17: mod_base = um
  modified_base 18: mod_base = gm
  modified_base 19: mod_base = gm
  modified_base 20: mod_base = cm
  modified_base 21: mod_base = OTHER; note = 2'-O-methyladenosine with a 3'-phosphorothioate linkage
  modified_base 22: mod_base = OTHER; note = 2'-O-methylguanosine with a 3'-phosphorothioate linkage
  modified_base 23: mod_base = gm
ttactccttcccttcttggcagg

SEQ ID NO: 561 - RNA, 21 nt, synthetic construct
  source 1..21: mol_type = other RNA
  modified_base 1: mod_base = OTHER; note = 2'-O-methylguanosine with a 3'-phosphorothioate linkage
  modified_base 2: mod_base = OTHER; note = 2'-O-methyladenosine with a 3'-phosphorothioate linkage
  modified_base 3: mod_base = OTHER; note = 2'-O-methyladenosine
  modified_base 4: mod_base = OTHER; note = 2'-O-methyladenosine
  modified_base 5: mod_base = gm
  modified_base 6: mod_base = um
  modified_base 7: mod_base = OTHER; note = 2'-fluorouridine
  modified_base 8: mod_base = cm
  modified_base 9: mod_base = OTHER; note = 2'-fluoroadenosine
  modified_base 10: mod_base = OTHER; note = Abasic site
  modified_base 11: mod_base = OTHER; note = 2'-fluorocytidine
  modified_base 12: mod_base = um
  modified_base 13: mod_base = gm
  modified_base 14: mod_base = cm
  modified_base 15: mod_base = um
  modified_base 16: mod_base = um
  modified_base 17: mod_base = cm
  modified_base 18: mod_base = gm
  modified_base 19: mod_base = OTHER; note = 2'-O-methyluridine with a 3'-phosphorothioate linkage
  modified_base 20: mod_base = OTHER; note = 2'-O-methyladenosine with a 3'-phosphorothioate linkage
  modified_base 21: mod_base = OTHER; note = 2'-O-methyladenosine with a 3'-phosphate substitution
gaaagttcanctgcttcgtaa

SEQ ID NO: 562 - RNA, 23 nt, synthetic construct
  source 1..23: mol_type = other RNA
  modified_base 1: mod_base = OTHER; note = 2'-O-methyluridine with a 3'-phosphorothioate linkage
  modified_base 2: mod_base = OTHER; note = 2'-fluorouridine with a 3'-phosphorothioate linkage
  modified_base 3: mod_base = OTHER; note = 2'-O-methyladenosine
  modified_base 4: mod_base = cm
  modified_base 5: mod_base = gm
  modified_base 6: mod_base = OTHER; note = 2'-O-methyladenosine
  modified_base 7: mod_base = OTHER; note = 2'-O-methyladenosine
  modified_base 8: mod_base = gm
  modified_base 9: mod_base = cm
  modified_base 10: mod_base = OTHER; note = 2'-O-methyladenosine
  modified_base 11: mod_base = gm
  modified_base 12: mod_base = um
  modified_base 13: mod_base = um
  modified_base 14: mod_base = OTHER; note = 2'-fluoroguanosine
  modified_base 15: mod_base = OTHER; note = 2'-O-methyladenosine
  modified_base 16: mod_base = OTHER; note = 2'-fluoroadenosine
  modified_base 17: mod_base = cm
  modified_base 18: mod_base = um
  modified_base 19: mod_base = um
  modified_base 20: mod_base = um
  modified_base 21: mod_base = OTHER; note = 2'-O-methylcytidine with a 3'-phosphorothioate linkage
  modified_base 22: mod_base = OTHER; note = 2'-O-methyluridine with a 3'-phosphorothioate linkage
  modified_base 23: mod_base = gm
ttacgaagcagttgaactttctg

SEQ ID NO: 563 - RNA, 23 nt, synthetic construct
  source 1..23: mol_type = other RNA
  modified_base 1: mod_base = OTHER; note = 2'-O-methyluridine with a 3'-phosphorothioate linkage
  modified_base 2: mod_base = OTHER; note = 2'-fluorouridine with a 3'-phosphorothioate linkage
  modified_base 3: mod_base = OTHER; note = 2'-O-methyladenosine
  modified_base 4: mod_base = cm
  modified_base 5: mod_base = OTHER; note = 2'-fluoroguanosine
  modified_base 6: mod_base = OTHER; note = 2'-O-methyladenosine
  modified_base 7: mod_base = OTHER; note = 2'-fluoroadenosine
  modified_base 8: mod_base = gm
  modified_base 9: mod_base = cm
  modified_base 10: mod_base = OTHER; note = 2'-O-methyladenosine
  modified_base 11: mod_base = gm
  modified_base 12: mod_base = um
  modified_base 13: mod_base = um
  modified_base 14: mod_base = OTHER; note = 2'-fluoroguanosine
  modified_base 15: mod_base = OTHER; note = 2'-O-methyladenosine
  modified_base 16: mod_base = OTHER; note = 2'-fluoroadenosine
  modified_base 17: mod_base = cm
  modified_base 18: mod_base = um
  modified_base 19: mod_base = um
  modified_base 20: mod_base = um
  modified_base 21: mod_base = OTHER; note = 2'-O-methylcytidine with a 3'-phosphorothioate linkage
  modified_base 22: mod_base = OTHER; note = 2'-O-methyluridine with a 3'-phosphorothioate linkage
  modified_base 23: mod_base = gm
ttacgaagcagttgaactttctg

SEQ ID NO: 564 - RNA, 21 nt, synthetic construct
  source 1..21: mol_type = other RNA
  modified_base 1: mod_base = OTHER; note = 2'-O-methylguanosine with a 3'-phosphorothioate linkage
  modified_base 2: mod_base = OTHER; note = 2'-O-methyladenosine with a 3'-phosphorothioate linkage
  modified_base 3: mod_base = OTHER; note = 2'-O-methyladenosine
  modified_base 4: mod_base = OTHER; note = 2'-O-methyladenosine
  modified_base 5: mod_base = gm
  modified_base 6: mod_base = um
  modified_base 7: mod_base = um
  modified_base 8: mod_base = cm
  modified_base 9: mod_base = OTHER; note = 2'-fluoroadenosine
  modified_base 10: mod_base = OTHER; note = 2'-fluoroadenosine
  modified_base 11: mod_base = OTHER; note = 2'-fluorocytidine
  modified_base 12: mod_base = um
  modified_base 13: mod_base = gm
  modified_base 14: mod_base = cm
  modified_base 15: mod_base = um
  modified_base 16: mod_base = um
  modified_base 17: mod_base = cm
  modified_base 18: mod_base = gm
  modified_base 19: mod_base = OTHER; note = 2'-O-methyluridine with a 3'-phosphorothioate linkage
  modified_base 20: mod_base = OTHER; note = 2'-O-methyladenosine with a 3'-phosphorothioate linkage
  modified_base 21: mod_base = OTHER; note = 2'-O-methyladenosine with a 3'-phosphate substitution
gaaagttcaactgcttcgtaa

SEQ ID NO: 565 - RNA, 21 nt, synthetic construct
  source 1..21: mol_type = other RNA
  modified_base 1: mod_base = OTHER; note = 2'-O-methylguanosine with a 3'-phosphorothioate linkage
  modified_base 2: mod_base = OTHER; note = 2'-O-methyluridine with a 3'-phosphorothioate linkage
  modified_base 3: mod_base = um
  modified_base 4: mod_base = gm
  modified_base 5: mod_base = OTHER; note = 2'-O-methyladenosine
  modified_base 6: mod_base = cm
  modified_base 7: mod_base = OTHER; note = 2'-fluorouridine
  modified_base 8: mod_base = um
  modified_base 9: mod_base = OTHER; note = 2'-fluoroguanosine
  modified_base 10: mod_base = OTHER; note = Abasic site
  modified_base 11: mod_base = OTHER; note = 2'-fluoroguanosine
  modified_base 12: mod_base = um
  modified_base 13: mod_base = OTHER; note = 2'-O-methyladenosine
  modified_base 14: mod_base = OTHER; note = 2'-O-methyladenosine
  modified_base 15: mod_base = OTHER; note = 2'-O-methyladenosine
  modified_base 16: mod_base = um
  modified_base 17: mod_base = OTHER; note = 2'-O-methyladenosine
  modified_base 18: mod_base = um
  modified_base 19: mod_base = OTHER; note = 2'-O-methyladenosine with a 3'-phosphorothioate linkage
  modified_base 20: mod_base = OTHER; note = 2'-O-methyluridine with a 3'-phosphorothioate linkage
  modified_base 21: mod_base = OTHER; note = 2'-O-methyladenosine with a 3'-phosphate substitution
gttgacttgngtaaatatata

SEQ ID NO: 566 - RNA, 23 nt, synthetic construct
  source 1..23: mol_type = other RNA
  modified_base 1: mod_base = OTHER; note = 2'-O-methyluridine with a 3'-phosphorothioate linkage
  modified_base 2: mod_base = OTHER; note = 2'-fluoroadenosine with a 3'-phosphorothioate linkage
  modified_base 3: mod_base = um
  modified_base 4: mod_base = OTHER; note = 2'-O-methyladenosine
  modified_base 5: mod_base = OTHER; note = 2'-fluorouridine
  modified_base 6: mod_base = OTHER; note = 2'-O-methyladenosine
  modified_base 7: mod_base = OTHER; note = 2'-fluorouridine
  modified_base 8: mod_base = um
  modified_base 9: mod_base = um
  modified_base 10: mod_base = OTHER; note = 2'-O-methyladenosine
  modified_base 11: mod_base = cm
  modified_base 12: mod_base = um
  modified_base 13: mod_base = cm
  modified_base 14: mod_base = OTHER; note = 2'-fluoroadenosine
  modified_base 15: mod_base = OTHER; note = 2'-O-methyladenosine
  modified_base 16: mod_base = OTHER; note = 2'-fluoroguanosine
  modified_base 17: mod_base = um
  modified_base 18: mod_base = cm
  modified_base 19: mod_base = OTHER; note = 2'-O-methyladenosine
  modified_base 20: mod_base = OTHER; note = 2'-O-methyladenosine
  modified_base 21: mod_base = OTHER; note = 2'-O-methylcytidine with a 3'-phosphorothioate linkage
  modified_base 22: mod_base = OTHER; note = 2'-O-methyladenosine with a 3'-phosphorothioate linkage
  modified_base 23: mod_base = um
tatatatttactcaagtcaacat

SEQ ID NO: 567 - RNA, 23 nt, synthetic construct
  source 1..23: mol_type = other RNA
  modified_base 1: mod_base = OTHER; note = 2'-O-methyluridine with a 3'-phosphorothioate linkage
  modified_base 2: mod_base = OTHER; note = 2'-fluoroadenosine with a 3'-phosphorothioate linkage
  modified_base 3: mod_base = OTHER; note = 2'-fluorouridine
  modified_base 4: mod_base = OTHER; note = 2'-O-methyladenosine
  modified_base 5: mod_base = um
  modified_base 6: mod_base = OTHER; note = 2'-O-methyladenosine
  modified_base 7: mod_base = OTHER; note = 2'-fluorouridine
  modified_base 8: mod_base = um
  modified_base 9: mod_base = um
  modified_base 10: mod_base = OTHER; note = 2'-O-methyladenosine
  modified_base 11: mod_base = cm
  modified_base 12: mod_base = um
  modified_base 13: mod_base = cm
  modified_base 14: mod_base = OTHER; note = 2'-fluoroadenosine
  modified_base 15: mod_base = OTHER; note = 2'-O-methyladenosine
  modified_base 16: mod_base = OTHER; note = 2'-fluoroguanosine
  modified_base 17: mod_base = um
  modified_base 18: mod_base = cm
  modified_base 19: mod_base = OTHER; note = 2'-O-methyladenosine
  modified_base 20: mod_base = OTHER; note = 2'-O-methyladenosine
  modified_base 21: mod_base = OTHER; note = 2'-O-methylcytidine with a 3'-phosphorothioate linkage
  modified_base 22: mod_base = OTHER; note = 2'-O-methyladenosine with a 3'-phosphorothioate linkage
  modified_base 23: mod_base = um
tatatatttactcaagtcaacat

SEQ ID NO: 568 - RNA, 21 nt, synthetic construct
  source 1..21: mol_type = other RNA
  modified_base 1: mod_base = OTHER; note = 2'-O-methylguanosine with a 3'-phosphorothioate linkage
  modified_base 2: mod_base = OTHER; note = 2'-O-methyluridine with a 3'-phosphorothioate linkage
  modified_base 3: mod_base = um
  modified_base 4: mod_base = gm
  modified_base 5: mod_base = OTHER; note = 2'-O-methyladenosine
  modified_base 6: mod_base = cm
  modified_base 7: mod_base = um
  modified_base 8: mod_base = um
  modified_base 9: mod_base = OTHER; note = 2'-fluoroguanosine
  modified_base 10: mod_base = OTHER; note = 2'-fluoroadenosine
  modified_base 11: mod_base = OTHER; note = 2'-fluoroguanosine
  modified_base 12: mod_base = um
  modified_base 13: mod_base = OTHER; note = 2'-O-methyladenosine
  modified_base 14: mod_base = OTHER; note = 2'-O-methyladenosine
  modified_base 15: mod_base = OTHER; note = 2'-O-methyladenosine
  modified_base 16: mod_base = um
  modified_base 17: mod_base = OTHER; note = 2'-O-methyladenosine
  modified_base 18: mod_base = um
  modified_base 19: mod_base = OTHER; note = 2'-O-methyladenosine with a 3'-phosphorothioate linkage
  modified_base 20: mod_base = OTHER; note = 2'-O-methyluridine with a 3'-phosphorothioate linkage
  modified_base 21: mod_base = OTHER; note = 2'-O-methyladenosine with a 3'-phosphate substitution
gttgacttgagtaaatatata

SEQ ID NO: 569 - RNA, 23 nt, synthetic construct
  source 1..23: mol_type = other RNA
  modified_base 1: mod_base = OTHER; note = 2'-O-methyluridine with a 3'-phosphorothioate linkage
  modified_base 2: mod_base = OTHER; note = 2'-fluoroadenosine with a 3'-phosphorothioate linkage
  modified_base 3: mod_base = um
  modified_base 4: mod_base = OTHER; note = 2'-O-methyladenosine
  modified_base 5: mod_base = OTHER; note = 2'-fluorouridine
  modified_base 6: mod_base = OTHER; note = Glycol nucleic acid
  modified_base 7: mod_base = OTHER; note = 2'-fluorouridine
  modified_base 8: mod_base = um
  modified_base 9: mod_base = um
  modified_base 10: mod_base = OTHER; note = 2'-O-methyladenosine
  modified_base 11: mod_base = cm
  modified_base 12: mod_base = um
  modified_base 13: mod_base = cm
  modified_base 14: mod_base = OTHER; note = 2'-fluoroadenosine
  modified_base 15: mod_base = OTHER; note = 2'-O-methyladenosine
  modified_base 16: mod_base = OTHER; note = 2'-fluoroguanosine
  modified_base 17: mod_base = um
  modified_base 18: mod_base = cm
  modified_base 19: mod_base = OTHER; note = 2'-O-methyladenosine
  modified_base 20: mod_base = OTHER; note = 2'-O-methyladenosine
  modified_base 21: mod_base = OTHER; note = 2'-O-methylcytidine with a 3'-phosphorothioate linkage
  modified_base 22: mod_base = OTHER; note = 2'-O-methyladenosine with a 3'-phosphorothioate linkage
  modified_base 23: mod_base = um
tatatatttactcaagtcaacat

SEQ ID NO: 570 - RNA, 23 nt, synthetic construct
  source 1..23: mol_type = other RNA
  modified_base 1: mod_base = OTHER; note = 2'-O-methyluridine with a 3'-phosphorothioate linkage
  modified_base 2: mod_base = OTHER; note = 2'-fluoroadenosine with a 3'-phosphorothioate linkage
  modified_base 3: mod_base = um
  modified_base 4: mod_base = OTHER; note = 2'-O-methyladenosine
  modified_base 5: mod_base = um
  modified_base 6: mod_base = OTHER; note = 2'-fluoroadenosine
  modified_base 7: mod_base = OTHER; note = Glycol nucleic acid
  modified_base 8: mod_base = um
  modified_base 9: mod_base = um
  modified_base 10: mod_base = OTHER; note = 2'-O-methyladenosine
  modified_base 11: mod_base = cm
  modified_base 12: mod_base = um
  modified_base 13: mod_base = cm
  modified_base 14: mod_base = OTHER; note = 2'-fluoroadenosine
  modified_base 15: mod_base = OTHER; note = 2'-O-methyladenosine
  modified_base 16: mod_base = OTHER; note = 2'-fluoroguanosine
  modified_base 17: mod_base = um
  modified_base 18: mod_base = cm
  modified_base 19: mod_base = OTHER; note = 2'-O-methyladenosine
  modified_base 20: mod_base = OTHER; note = 2'-O-methyladenosine
  modified_base 21: mod_base = OTHER; note = 2'-O-methylcytidine with a 3'-phosphorothioate linkage
  modified_base 22: mod_base = OTHER; note = 2'-O-methyladenosine with a 3'-phosphorothioate linkage
  modified_base 23: mod_base = um
tatatatttactcaagtcaacat

SEQ ID NO: 571 - RNA, 23 nt, synthetic construct
  source 1..23: mol_type = other RNA
  modified_base 1: mod_base = OTHER; note = 2'-O-methyluridine with a 3'-phosphorothioate linkage
  modified_base 2: mod_base = OTHER; note = 2'-fluorouridine with a 3'-phosphorothioate linkage
  modified_base 3: mod_base = OTHER; note = 2'-fluoroadenosine
  modified_base 4: mod_base = cm
  modified_base 5: mod_base = gm
  modified_base 6: mod_base = OTHER; note = 2'-O-methyladenosine
  modified_base 7: mod_base = OTHER; note = 2'-fluoroadenosine
  modified_base 8: mod_base = gm
  modified_base 9: mod_base = cm
  modified_base 10: mod_base = OTHER; note = 2'-O-methyladenosine
  modified_base 11: mod_base = gm
  modified_base 12: mod_base = um
  modified_base 13: mod_base = um
  modified_base 14: mod_base = OTHER; note = 2'-fluoroguanosine
  modified_base 15: mod_base = OTHER; note = 2'-O-methyladenosine
  modified_base 16: mod_base = OTHER; note = 2'-fluoroadenosine
  modified_base 17: mod_base = cm
  modified_base 18: mod_base = um
  modified_base 19: mod_base = um
  modified_base 20: mod_base = um
  modified_base 21: mod_base = OTHER; note = 2'-O-methylcytidine with a 3'-phosphorothioate linkage
  modified_base 22: mod_base = OTHER; note = 2'-O-methyluridine with a 3'-phosphorothioate linkage
  modified_base 23: mod_base = gm
ttacgaagcagttgaactttctg

SEQ ID NO: 572 - RNA, 21 nt, synthetic construct
  source 1..21: mol_type = other RNA
agaaagttcaactgcttcgta

SEQ ID NO: 573 - RNA, 23 nt, synthetic construct
  source 1..23: mol_type = other RNA
tacgaagcagttgaactttctgt

SEQ ID NO: 574 - RNA, 21 nt, synthetic construct
  source 1..21: mol_type = other RNA
  modified_base 1: mod_base = OTHER; note = 2'-O-methyladenosine with a 3'-phosphorothioate linkage
  modified_base 2: mod_base = OTHER; note = 2'-O-methylguanosine with a 3'-phosphorothioate linkage
  modified_base 3: mod_base = OTHER; note = 2'-O-methyladenosine
  modified_base 4: mod_base = OTHER; note = 2'-O-methyladenosine
  modified_base 5: mod_base = OTHER; note = 2'-O-methyladenosine
  modified_base 6: mod_base = gm
  modified_base 7: mod_base = OTHER; note = 2'-fluorouridine
  modified_base 8: mod_base = um
  modified_base 9: mod_base = OTHER; note = 2'-fluorocytidine
  modified_base 10: mod_base = OTHER; note = 2'-fluoroadenosine
  modified_base 11: mod_base = OTHER; note = 2'-fluoroadenosine
  modified_base 12: mod_base = cm
  modified_base 13: mod_base = um
  modified_base 14: mod_base = gm
  modified_base 15: mod_base = cm
  modified_base 16: mod_base = um
  modified_base 17: mod_base = um
  modified_base 18: mod_base = cm
  modified_base 19: mod_base = OTHER; note = 2'-O-methylguanosine with a 3'-phosphorothioate linkage
  modified_base 20: mod_base = OTHER; note = 2'-O-methyluridine with a 3'-phosphorothioate linkage
  modified_base 21: mod_base = OTHER; note = 2'-O-methyladenosine
agaaagttcaactgcttcgta

SEQ ID NO: 575 - RNA, 23 nt, synthetic construct
  source 1..23: mol_type = other RNA
  modified_base 1: mod_base = OTHER; note = 2'-O-methyluridine with a 3'-phosphorothioate linkage
  modified_base 2: mod_base = OTHER; note = 2'-fluoroadenosine with a 3'-phosphorothioate linkage
  modified_base 3: mod_base = cm
  modified_base 4: mod_base = gm
  modified_base 5: mod_base = OTHER; note = 2'-O-methyladenosine
  modified_base 6: mod_base = OTHER; note = 2'-fluoroadenosine
  modified_base 7: mod_base = gm
  modified_base 8: mod_base = cm
  modified_base 9: mod_base = OTHER; note = 2'-O-methyladenosine
  modified_base 10: mod_base = gm
  modified_base 11: mod_base = um
  modified_base 12: mod_base = um
  modified_base 13: mod_base = gm
  modified_base 14: mod_base = OTHER; note = 2'-fluoroadenosine
  modified_base 15: mod_base = OTHER; note = 2'-O-methyladenosine
  modified_base 16: mod_base = OTHER; note = 2'-fluorocytidine
  modified_base 17: mod_base = um
  modified_base 18: mod_base = um
  modified_base 19: mod_base = um
  modified_base 20: mod_base = cm
  modified_base 21: mod_base = OTHER; note = 2'-O-methyluridine with a 3'-phosphorothioate linkage
  modified_base 22: mod_base = OTHER; note = 2'-O-methylguanosine with a 3'-phosphorothioate linkage
  modified_base 23: mod_base = um
tacgaagcagttgaactttctgt

SEQ ID NO: 576 - RNA, 21 nt, synthetic construct
  source 1..21: mol_type = other RNA
agaaagttcaactgcttcgta

SEQ ID NO: 577 - RNA, 23 nt, synthetic construct
  source 1..23: mol_type = other RNA
tacgaagcagttgaactttctgt

SEQ ID NO: 578 - RNA, 21 nt, synthetic construct
  source 1..21: mol_type = other RNA
  modified_base 1: mod_base = OTHER; note = 2'-O-methyladenosine with a 3'-phosphorothioate linkage
  modified_base 2: mod_base = OTHER; note = 2'-O-methylguanosine with a 3'-phosphorothioate linkage
  modified_base 3: mod_base = OTHER; note = 2'-O-methyladenosine
  modified_base 4: mod_base = OTHER; note = 2'-O-methyladenosine
  modified_base 5: mod_base = OTHER; note = 2'-O-methyladenosine
  modified_base 6: mod_base = gm
  modified_base 7: mod_base = OTHER; note = 2'-fluorouridine
  modified_base 8: mod_base = um
  modified_base 9: mod_base = OTHER; note = 2'-fluorocytidine
  modified_base 10: mod_base = OTHER; note = 2'-fluoroadenosine
  modified_base 11: mod_base = OTHER; note = 2'-fluoroadenosine
  modified_base 12: mod_base = cm
  modified_base 13: mod_base = um
  modified_base 14: mod_base = gm
  modified_base 15: mod_base = cm
  modified_base 16: mod_base = um
  modified_base 17: mod_base = um
  modified_base 18: mod_base = cm
  modified_base 19: mod_base = OTHER; note = 2'-O-methylguanosine with a 3'-phosphorothioate linkage
  modified_base 20: mod_base = OTHER; note = 2'-O-methyluridine with a 3'-phosphorothioate linkage
  modified_base 21: mod_base = OTHER; note = 2'-O-methyladenosine with a 3'-phosphate substitution
agaaagttcaactgcttcgta

SEQ ID NO: 579 - RNA, 23 nt, synthetic construct
  source 1..23: mol_type = other RNA
  modified_base 1: mod_base = OTHER; note = 2'-O-methyluridine with a 3'-phosphorothioate linkage
  modified_base 2: mod_base = OTHER; note = 2'-fluoroadenosine with a 3'-phosphorothioate linkage
  modified_base 3: mod_base = cm
  modified_base 4: mod_base = gm
  modified_base 5: mod_base = OTHER; note = 2'-O-methyladenosine
  modified_base 6: mod_base = OTHER; note = 2'-fluoroadenosine
  modified_base 7: mod_base = gm
  modified_base 8: mod_base = cm
  modified_base 9: mod_base = OTHER; note = 2'-O-methyladenosine
  modified_base 10: mod_base = gm
  modified_base 11: mod_base = um
  modified_base 12: mod_base = um
  modified_base 13: mod_base = gm
  modified_base 14: mod_base = OTHER; note = 2'-fluoroadenosine
  modified_base 15: mod_base = OTHER; note = 2'-O-methyladenosine
  modified_base 16: mod_base = OTHER; note = 2'-fluorocytidine
  modified_base 17: mod_base = um
  modified_base 18: mod_base = um
  modified_base 19: mod_base = um
  modified_base 20: mod_base = cm
  modified_base 21: mod_base = OTHER; note = 2'-O-methyluridine with a 3'-phosphorothioate linkage
  modified_base 22: mod_base = OTHER; note = 2'-O-methylguanosine with a 3'-phosphorothioate linkage
  modified_base 23: mod_base = um
tacgaagcagttgaactttctgt

SEQ ID NO: 580 - RNA, 21 nt, synthetic construct
  source 1..21: mol_type = other RNA
  modified_base 1: mod_base = OTHER; note = 2'-O-methylcytidine with a 3'-phosphorothioate linkage
  modified_base 2: mod_base = OTHER; note = 2'-O-methyluridine with a 3'-phosphorothioate linkage
  modified_base 3: mod_base = gm
  modified_base 4: mod_base = um
  modified_base 5: mod_base = OTHER; note = 2'-O-methyladenosine
  modified_base 6: mod_base = um
  modified_base 7: mod_base = gm
  modified_base 8: mod_base = um
  modified_base 9: mod_base = OTHER; note = 2'-fluoroguanosine
  modified_base 10: mod_base = OTHER; note = 2'-fluoroadenosine
  modified_base 11: mod_base = OTHER; note = 2'-fluoroadenosine
  modified_base 12: mod_base = cm
  modified_base 13: mod_base = OTHER; note = 2'-O-methyladenosine
  modified_base 14: mod_base = cm
  modified_base 15: mod_base = um
  modified_base 16: mod_base = gm
  modified_base 17: mod_base = um
  modified_base 18: mod_base = gm
  modified_base 19: mod_base = OTHER; note = 2'-O-methyladenosine with a 3'-phosphorothioate linkage
  modified_base 20: mod_base = OTHER; note = 2'-O-methylcytidine with a 3'-phosphorothioate linkage
  modified_base 21: mod_base = OTHER; note = 2'-O-methyladenosine with a 3'-phosphate substitution
ctgtatgtgaacactgtgaca

SEQ ID NO: 581 - RNA, 23 nt, synthetic construct
  source 1..23: mol_type = other RNA
  modified_base 1: mod_base = OTHER; note = 2'-O-methyluridine with a 3'-phosphorothioate linkage
  modified_base 2: mod_base = OTHER; note = 2'-fluoroguanosine with a 3'-phosphorothioate linkage
  modified_base 3: mod_base = OTHER; note = 2'-fluorouridine
  modified_base 4: mod_base = cm
  modified_base 5: mod_base = OTHER; note = 2'-O-methyladenosine
  modified_base 6: mod_base = cm
  modified_base 7: mod_base = OTHER; note = 2'-fluoroadenosine
  modified_base 8: mod_base = gm
  modified_base 9: mod_base = um
  modified_base 10: mod_base = gm
  modified_base 11: mod_base = um
  modified_base 12: mod_base = um
  modified_base 13: mod_base = cm
  modified_base 14: mod_base = OTHER; note = 2'-fluoroadenosine
  modified_base 15: mod_base = cm
  modified_base 16: mod_base = OTHER; note = 2'-fluoroadenosine
  modified_base 17: mod_base = um
  modified_base 18: mod_base = OTHER; note = 2'-O-methyladenosine
  modified_base 19: mod_base = cm
  modified_base 20: mod_base = OTHER; note = 2'-O-methyladenosine
  modified_base 21: mod_base = OTHER; note = 2'-O-methylguanosine with a 3'-phosphorothioate linkage
  modified_base 22: mod_base = OTHER; note = 2'-O-methyluridine with a 3'-phosphorothioate linkage
  modified_base 23: mod_base = OTHER; note = 2'-O-methyladenosine
tgtcacagtgttcacatacagta

SEQ ID NO: 582 - RNA, 21 nt, synthetic construct
  source 1..21: mol_type = other RNA
  modified_base 1: mod_base = OTHER; note = 2'-O-methyluridine with a 3'-phosphorothioate linkage
  modified_base 2: mod_base = OTHER; note = 2'-O-methylguanosine with a 3'-phosphorothioate linkage
  modified_base 3: mod_base = OTHER; note = 2'-O-methyladenosine
  modified_base 4: mod_base = cm
  modified_base 5: mod_base = um
  modified_base 6: mod_base = um
  modified_base 7: mod_base = gm
  modified_base 8: mod_base = OTHER; note = 2'-O-methyladenosine
  modified_base 9: mod_base = OTHER; note = 2'-fluoroguanosine
  modified_base 10: mod_base = OTHER; note = 2'-fluorouridine
  modified_base 11: mod_base = OTHER; note = 2'-fluoroadenosine
  modified_base 12: mod_base = OTHER; note = 2'-O-methyladenosine
  modified_base 13: mod_base = OTHER; note = 2'-O-methyladenosine
  modified_base 14: mod_base = um
  modified_base 15: mod_base = OTHER; note = 2'-O-methyladenosine
  modified_base 16: mod_base = um
  modified_base 17: mod_base = OTHER; note = 2'-O-methyladenosine
  modified_base 18: mod_base = um
  modified_base 19: mod_base = OTHER; note = 2'-O-methylcytidine with a 3'-phosphorothioate linkage
  modified_base 20: mod_base = OTHER; note = 2'-O-methyladenosine with a 3'-phosphorothioate linkage
  modified_base 21: mod_base = OTHER; note = 2'-O-methyladenosine with a 3'-phosphate substitution
tgacttgagtaaatatatcaa

SEQ ID NO: 583 - RNA, 23 nt, synthetic construct
  source 1..23: mol_type = other RNA
  modified_base 1: mod_base = OTHER; note = 2'-O-methyluridine with a 3'-phosphorothioate linkage
  modified_base 2: mod_base = OTHER; note = 2'-fluorouridine with a 3'-phosphorothioate linkage
  modified_base 3: mod_base = OTHER; note = 2'-fluoroguanosine
  modified_base 4: mod_base = OTHER; note = 2'-O-methyladenosine
  modified_base 5: mod_base = um
  modified_base 6: mod_base = OTHER; note = 2'-O-methyladenosine
  modified_base 7: mod_base = OTHER; note = 2'-fluorouridine
  modified_base 8: mod_base = OTHER; note = 2'-O-methyladenosine
  modified_base 9: mod_base = um
  modified_base 10: mod_base = um
  modified_base 11: mod_base = um
  modified_base 12: mod_base = OTHER; note = 2'-O-methyladenosine
  modified_base 13: mod_base = cm
  modified_base 14: mod_base = OTHER; note = 2'-fluorouridine
  modified_base 15: mod_base = cm
  modified_base 16: mod_base = OTHER; note = 2'-fluoroadenosine
  modified_base 17: mod_base = OTHER; note = 2'-O-methyladenosine
  modified_base 18: mod_base = gm
  modified_base 19: mod_base = um
  modified_base 20: mod_base = cm
  modified_base 21: mod_base = OTHER; note = 2'-O-methyladenosine with a 3'-phosphorothioate linkage
  modified_base 22: mod_base = OTHER; note = 2'-O-methyladenosine with a 3'-phosphorothioate linkage
  modified_base 23: mod_base = cm
ttgatatatttactcaagtcaac

SEQ ID NO: 584 - RNA, 21 nt, synthetic construct
  source 1..21: mol_type = other RNA
  modified_base 1: mod_base = OTHER; note = 2'-O-methylguanosine with a 3'-phosphorothioate linkage
  modified_base 2: mod_base = OTHER; note = 2'-O-methyluridine with a 3'-phosphorothioate linkage
  modified_base 3: mod_base = OTHER; note = 2'-O-methyladenosine
  modified_base 4: mod_base = um
  modified_base 5: mod_base = gm
  modified_base 6: mod_base = um
  modified_base 7: mod_base = gm
  modified_base 8: mod_base = OTHER; note = 2'-O-methyladenosine
  modified_base 9: mod_base = OTHER; note = 2'-fluoroadenosine
  modified_base 10: mod_base = OTHER; note = 2'-fluorocytidine
  modified_base 11: mod_base = OTHER; note = 2'-fluoroadenosine
  modified_base 12: mod_base = cm
  modified_base 13: mod_base = um
  modified_base 14: mod_base = gm
  modified_base 15: mod_base = um
  modified_base 16: mod_base = gm
  modified_base 17: mod_base = OTHER; note = 2'-O-methyladenosine
  modified_base 18: mod_base = cm
  modified_base 19: mod_base = OTHER; note = 2'-O-methylcytidine with a 3'-phosphorothioate linkage
  modified_base 20: mod_base = OTHER; note = 2'-O-methylcytidine with a 3'-phosphorothioate linkage
  modified_base 21: mod_base = OTHER; note = 2'-O-methyladenosine with a 3'-phosphate substitution
gtatgtgaacactgtgaccca

SEQ ID NO: 585 - RNA, 23 nt, synthetic construct
  source 1..23: mol_type = other RNA
  modified_base 1: mod_base = OTHER; note = 2'-O-methyluridine with a 3'-phosphorothioate linkage
  modified_base 2: mod_base = OTHER; note = 2'-fluoroguanosine with a 3'-phosphorothioate linkage
  modified_base 3: mod_base = OTHER; note = 2'-fluoroguanosine
  modified_base 4: mod_base = gm
  modified_base 5: mod_base = um
  modified_base 6: mod_base = cm
  modified_base 7: mod_base = OTHER; note = 2'-fluoroadenosine
  modified_base 8: mod_base = cm
  modified_base 9: mod_base = OTHER; note = 2'-O-methyladenosine
  modified_base 10: mod_base = gm
  modified_base 11: mod_base = um
  modified_base 12: mod_base = gm
  modified_base 13: mod_base = um
  modified_base 14: mod_base = OTHER; note = 2'-fluorouridine
  modified_base 15: mod_base = cm
  modified_base 16: mod_base = OTHER; note = 2'-fluoroadenosine
  modified_base 17: mod_base = cm
  modified_base 18: mod_base = OTHER; note = 2'-O-methyladenosine
  modified_base 19: mod_base = um
  modified_base 20: mod_base = OTHER; note = 2'-O-methyladenosine
  modified_base 21: mod_base = OTHER; note = 2'-O-methylcytidine with a 3'-phosphorothioate linkage
  modified_base 22: mod_base = OTHER; note = 2'-O-methyladenosine with a 3'-phosphorothioate linkage
  modified_base 23: mod_base = gm
tgggtcacagtgttcacatacag

SEQ ID NO: 586 - RNA, 21 nt, synthetic construct
  source 1..21: mol_type = other RNA
  modified_base 1: mod_base = OTHER; note = 2'-O-methylguanosine with a 3'-phosphorothioate linkage
  modified_base 2: mod_base = OTHER; note = 2'-O-methyladenosine with a 3'-phosphorothioate linkage
  modified_base 3: mod_base = um
  modified_base 4: mod_base = gm
  modified_base 5: mod_base = OTHER; note = 2'-O-methyladenosine
  modified_base 6: mod_base = OTHER; note = 2'-O-methyladenosine
  modified_base 7: mod_base = OTHER; note = 2'-fluoroguanosine
  modified_base 8: mod_base = gm
  modified_base 9: mod_base = OTHER; note = 2'-fluoroadenosine
  modified_base 10: mod_base = OTHER; note = 2'-fluorocytidine
  modified_base 11: mod_base = OTHER; note = 2'-fluoroadenosine
  modified_base 12: mod_base = um
  modified_base 13: mod_base = gm
  modified_base 14: mod_base = gm
  modified_base 15: mod_base = cm
  modified_base 16: mod_base = um
  modified_base 17: mod_base = um
  modified_base 18: mod_base = OTHER; note = 2'-O-methyladenosine
  modified_base 19: mod_base = OTHER; note = 2'-O-methylguanosine with a 3'-phosphorothioate linkage
  modified_base 20: mod_base = OTHER; note = 2'-O-methyladenosine with a 3'-phosphorothioate linkage
  modified_base 21: mod_base = OTHER; note = 2'-O-methyladenosine
gatgaaggacatggcttagaa

SEQ ID NO: 587 - RNA, 23 nt, synthetic construct
  source 1..23: mol_type = other RNA
  modified_base 1: mod_base = OTHER; note = 2'-O-methyluridine with a 3'-phosphorothioate linkage
  modified_base 2: mod_base = OTHER; note = 2'-fluorouridine with a 3'-phosphorothioate linkage
  modified_base 3: mod_base = cm
  modified_base 4: mod_base = um
  modified_base 5: mod_base = OTHER; note = 2'-O-methyladenosine
  modified_base 6: mod_base = OTHER; note = 2'-fluoroadenosine
  modified_base 7: mod_base = gm
  modified_base 8: mod_base = cm
  modified_base 9: mod_base = cm
  modified_base 10: mod_base = OTHER; note = 2'-O-methyladenosine
  modified_base 11: mod_base = um
  modified_base 12: mod_base = gm
  modified_base 13: mod_base = um
  modified_base 14: mod_base = OTHER; note = 2'-fluorocytidine
  modified_base 15: mod_base = cm
  modified_base 16: mod_base = OTHER; note = 2'-fluorouridine
  modified_base 17: mod_base = um
  modified_base 18: mod_base = cm
  modified_base 19: mod_base = OTHER; note = 2'-O-methyladenosine
  modified_base 20: mod_base = um
  modified_base 21: mod_base = OTHER; note = 2'-O-methylcytidine with a 3'-phosphorothioate linkage
  modified_base 22: mod_base = OTHER; note = 2'-O-methyladenosine with a 3'-phosphorothioate linkage
  modified_base 23: mod_base = cm
ttctaagccatgtccttcatcac

SEQ ID NO: 588 - RNA, 21 nt, synthetic construct
  source 1..21: mol_type = other RNA
  modified_base 1: mod_base = OTHER; note = 2'-O-methyluridine with a 3'-phosphorothioate linkage
  modified_base 2: mod_base = OTHER; note = 2'-O-methyladenosine with a 3'-phosphorothioate linkage
  modified_base 3: mod_base = OTHER; note = 2'-O-methyladenosine
  modified_base 4: mod_base = OTHER; note = 2'-O-methyladenosine
  modified_base 5: mod_base = cm
  modified_base 6: mod_base = cm
  modified_base 7: mod_base = OTHER; note = 2'-fluoroadenosine
  modified_base 8: mod_base = OTHER; note = 2'-O-methyladenosine
  modified_base 9: mod_base = OTHER; note = 2'-fluoroadenosine
  modified_base 10: mod_base = OTHER; note = 2'-fluorocytidine
  modified_base 11: mod_base = OTHER; note = 2'-fluorouridine
  modified_base 12: mod_base = um
  modified_base 13: mod_base = um
  modified_base 14: mod_base = um
  modified_base 15: mod_base = um
  modified_base 16: mod_base = um
  modified_base 17: mod_base = um
  modified_base 18: mod_base = gm
  modified_base 19: mod_base = OTHER; note = 2'-O-methyluridine with a 3'-phosphorothioate linkage
  modified_base 20: mod_base = OTHER; note = 2'-O-methyladenosine with a 3'-phosphorothioate linkage
  modified_base 21: mod_base = OTHER; note = 2'-O-methyladenosine
taaaccaaactttttttgtaa

SEQ ID NO: 589 - RNA, 23 nt, synthetic construct
  source 1..23: mol_type = other RNA
  modified_base 1: mod_base = OTHER; note = 2'-O-methyluridine with a 3'-phosphorothioate linkage
  modified_base 2: mod_base = OTHER; note = 2'-fluorouridine with a 3'-phosphorothioate linkage
  modified_base 3: mod_base = OTHER; note = 2'-O-methyladenosine
  modified_base 4: mod_base = cm
  modified_base 5: mod_base = OTHER; note = 2'-O-methyladenosine
  modified_base 6: mod_base = OTHER; note = 2'-fluoroadenosine
  modified_base 7: mod_base = OTHER; note = 2'-O-methyladenosine
  modified_base 8: mod_base = OTHER; note = 2'-O-methyladenosine
  modified_base 9: mod_base = OTHER; note = 2'-O-methyladenosine
  modified_base 10: mod_base = OTHER; note = 2'-O-methyladenosine
  modified_base 11: mod_base = OTHER; note = 2'-O-methyladenosine
  modified_base 12: mod_base = gm
  modified_base 13: mod_base = um
  modified_base 14: mod_base = OTHER; note = 2'-fluorouridine
  modified_base 15: mod_base = um
  modified_base 16: mod_base = OTHER; note = 2'-fluoroguanosine
  modified_base 17: mod_base = gm
  modified_base 18: mod_base = um
  modified_base 19: mod_base = um
  modified_base 20: mod_base = um
  modified_base 21: mod_base = OTHER; note = 2'-O-methyladenosine with a 3'-phosphorothioate linkage
  modified_base 22: mod_base = OTHER; note = 2'-O-methylcytidine with a 3'-phosphorothioate linkage
  modified_base 23: mod_base = OTHER; note = 2'-O-methyladenosine
ttacaaaaaaagtttggtttaca

SEQ ID NO: 590 - RNA, 21 nt, synthetic construct
  source 1..21: mol_type = other RNA
  modified_base 1: mod_base = OTHER; note = 2'-O-methylguanosine with a 3'-phosphorothioate linkage
  modified_base 2: mod_base = OTHER; note = 2'-O-methyladenosine with a 3'-phosphorothioate linkage
  modified_base 3: mod_base = OTHER; note = 2'-O-methyladenosine
  modified_base 4: mod_base = gm
  modified_base 5: mod_base = OTHER; note = 2'-O-methyladenosine
  modified_base 6: mod_base = um
  modified_base 7: mod_base = OTHER; note = 2'-fluoroguanosine
  modified_base 8: mod_base = um
  modified_base 9: mod_base = OTHER; note = 2'-fluoroadenosine
  modified_base 10: mod_base = OTHER; note = 2'-fluoroguanosine
  modified_base 11: mod_base = OTHER; note = 2'-fluoroadenosine
  modified_base 12: mod_base = um
  modified_base 13: mod_base = um
  modified_base 14: mod_base = gm
  modified_base 15: mod_base = um
  modified_base 16: mod_base = gm
  modified_base 17: mod_base = um
  modified_base 18: mod_base = gm
  modified_base 19: mod_base = OTHER; note = 2'-O-methyladenosine with a 3'-phosphorothioate linkage
  modified_base 20: mod_base = OTHER; note = 2'-O-methyluridine with a 3'-phosphorothioate linkage
  modified_base 21: mod_base = OTHER; note = 2'-O-methyladenosine
gaagatgtagattgtgtgata

SEQ ID NO: 591 - RNA, 23 nt, synthetic construct
  source 1..23: mol_type = other RNA
  modified_base 1: mod_base = OTHER; note = 2'-O-methyluridine with a 3'-phosphorothioate linkage
  modified_base 2: mod_base = OTHER; note = 2'-fluoroadenosine with a 3'-phosphorothioate linkage
  modified_base 3: mod_base = um
  modified_base 4: mod_base = cm
  modified_base 5: mod_base = OTHER; note = 2'-O-methyladenosine
  modified_base 6: mod_base = OTHER; note = 2'-fluorocytidine
  modified_base 7: mod_base = OTHER; note = 2'-O-methyladenosine
  modified_base 8: mod_base = cm
  modified_base 9: mod_base = OTHER; note = 2'-O-methyladenosine
  modified_base 10: mod_base = OTHER; note = 2'-O-methyladenosine
  modified_base 11: mod_base = um
  modified_base 12: mod_base = cm
  modified_base 13: mod_base = um
  modified_base 14: mod_base = OTHER; note = 2'-fluoroadenosine
  modified_base 15: mod_base = cm
  modified_base 16: mod_base = OTHER; note = 2'-fluoroadenosine
  modified_base 17: mod_base = um
  modified_base 18: mod_base = cm
  modified_base 19: mod_base = um
  modified_base 20: mod_base = um
  modified_base 21: mod_base = OTHER; note = 2'-O-methylcytidine with a 3'-phosphorothioate linkage
  modified_base 22: mod_base = OTHER; note = 2'-O-methyluridine with a 3'-phosphorothioate linkage
  modified_base 23: mod_base = gm
tatcacacaatctacatcttctg

SEQ ID NO: 592 - RNA, 21 nt, synthetic construct
  source 1..21: mol_type = other RNA
  modified_base 1: mod_base = OTHER; note = 2'-O-methylguanosine with a 3'-phosphorothioate linkage
  modified_base 2: mod_base = OTHER; note = 2'-O-methyluridine with a 3'-phosphorothioate linkage
  modified_base 3: mod_base = um
  modified_base 4: mod_base = gm
  modified_base 5: mod_base = OTHER; note = 2'-O-methyladenosine
  modified_base 6: mod_base = cm
  modified_base 7: mod_base = OTHER; note = 2'-fluorouridine
  modified_base 8: mod_base = um
  modified_base 9: mod_base = OTHER; note = 2'-fluoroguanosine
  modified_base 10: mod_base = OTHER; note = 2'-fluoroadenosine
  modified_base 11: mod_base = OTHER; note = 2'-fluoroguanosine
  modified_base 12: mod_base = um
  modified_base 13: mod_base = OTHER; note = 2'-O-methyladenosine
  modified_base 14: mod_base = OTHER; note = 2'-O-methyladenosine
  modified_base 15: mod_base = OTHER; note = 2'-O-methyladenosine
  modified_base 16: mod_base = um
  modified_base 17: mod_base = OTHER; note = 2'-O-methyladenosine
  modified_base 18: mod_base = um
  modified_base 19: mod_base = OTHER; note = 2'-O-methyladenosine with a 3'-phosphorothioate linkage
  modified_base 20: mod_base = OTHER; note = 2'-O-methyluridine with a 3'-phosphorothioate linkage
  modified_base 21: mod_base = OTHER; note = 2'-O-methyladenosine
gttgacttgagtaaatatata

SEQ ID NO: 593 - RNA, 23 nt, synthetic construct
  source 1..23: mol_type = other RNA
  modified_base 1: mod_base = OTHER; note = 2'-O-methyluridine with a 3'-phosphorothioate linkage
  modified_base 2: mod_base = OTHER; note = 2'-fluoroadenosine with a 3'-phosphorothioate linkage
  modified_base 3: mod_base = um
  modified_base 4: mod_base = OTHER; note = 2'-O-methyladenosine
  modified_base 5: mod_base = um
  modified_base 6: mod_base = OTHER; note = 2'-fluoroadenosine
  modified_base 7: mod_base = um
  modified_base 8: mod_base = um
  modified_base 9: mod_base = um
  modified_base 10: mod_base = OTHER; note = 2'-O-methyladenosine
  modified_base 11: mod_base = cm
  modified_base 12: mod_base = um
  modified_base 13: mod_base = cm
  modified_base 14: mod_base = OTHER; note = 2'-fluoroadenosine
  modified_base 15: mod_base = OTHER; note = 2'-O-methyladenosine
  modified_base 16: mod_base = OTHER; note = 2'-fluoroguanosine
  modified_base 17: mod_base = um
  modified_base 18: mod_base = cm
  modified_base 19: mod_base = OTHER; note = 2'-O-methyladenosine
  modified_base 20: mod_base = OTHER; note = 2'-O-methyladenosine
  modified_base 21: mod_base = OTHER; note = 2'-O-methylcytidine with a 3'-phosphorothioate linkage
  modified_base 22: mod_base = OTHER; note = 2'-O-methyladenosine with a 3'-phosphorothioate linkage
  modified_base 23: mod_base = um
tatatatttactcaagtcaacat

SEQ ID NO: 594 - RNA, 21 nt, synthetic construct
  source 1..21: mol_type = other RNA
  modified_base 1: mod_base = OTHER; note = 2'-O-methyladenosine with a 3'-phosphorothioate linkage
  modified_base 2: mod_base = OTHER; note = 2'-O-methyluridine with a 3'-phosphorothioate linkage
  modified_base 3: mod_base = cm
  modified_base 4: mod_base = OTHER; note = 2'-O-methyladenosine
  modified_base 5: mod_base = OTHER; note = 2'-O-methyladenosine
  modified_base 6: mod_base = gm
  modified_base 7: mod_base = OTHER; note = 2'-fluoroadenosine
  modified_base 8: mod_base = OTHER; note = 2'-O-methyladenosine
  modified_base 9: mod_base = OTHER; note = 2'-fluorouridine
  modified_base 10: mod_base = OTHER; note = 2'-fluoroguanosine
  modified_base 11: mod_base = OTHER; note = 2'-fluoroadenosine
  modified_base 12: mod_base = cm
  modified_base 13: mod_base = OTHER; note = 2'-O-methyladenosine
  modified_base 14: mod_base = OTHER; note = 2'-O-methyladenosine
  modified_base 15: mod_base = um
  modified_base 16: mod_base = gm
  modified_base 17: mod_base = um
  modified_base 18: mod_base = cm
  modified_base 19: mod_base = OTHER; note = 2'-O-methylcytidine with a 3'-phosphorothioate linkage
  modified_base 20: mod_base = OTHER; note = 2'-O-methyladenosine with a 3'-phosphorothioate linkage
  modified_base 21: mod_base = OTHER; note = 2'-O-methyladenosine
atcaagaatgacaatgtccaa

SEQ ID NO: 595 - RNA, 23 nt, synthetic construct
  source 1..23: mol_type = other RNA
  modified_base 1: mod_base = OTHER; note = 2'-O-methyluridine with a 3'-phosphorothioate linkage
  modified_base 2: mod_base = OTHER; note = 2'-fluorouridine with a 3'-phosphorothioate linkage
  modified_base 3: mod_base = gm
  modified_base 4: mod_base = gm
  modified_base 5: mod_base = OTHER; note = 2'-O-methyladenosine
  modified_base 6: mod_base = OTHER; note = 2'-fluorocytidine
  modified_base 7: mod_base = OTHER; note = 2'-O-methyladenosine
  modified_base 8: mod_base = um
  modified_base 9: mod_base = um
  modified_base 10: mod_base = gm
  modified_base 11: mod_base = um
  modified_base 12: mod_base = cm
  modified_base 13: mod_base = OTHER; note = 2'-O-methyladenosine
  modified_base 14: mod_base = OTHER; note = 2'-fluorouridine
  modified_base 15: mod_base = um
  modified_base 16: mod_base = OTHER; note = 2'-fluorocytidine
  modified_base 17: mod_base = um
  modified_base 18: mod_base = um
  modified_base 19: mod_base = gm
  modified_base 20: mod_base = OTHER; note = 2'-O-methyladenosine
  modified_base 21: mod_base = OTHER; note = 2'-O-methyluridine with a 3'-phosphorothioate linkage
  modified_base 22: mod_base = OTHER; note = 2'-O-methylcytidine with a 3'-phosphorothioate linkage
  modified_base 23: mod_base = um
ttggacattgtcattcttgatct

SEQ ID NO: 596 - RNA, 21 nt, synthetic construct
  source 1..21: mol_type = other RNA
  modified_base 1: mod_base = OTHER; note = 2'-O-methyluridine with a 3'-phosphorothioate linkage
  modified_base 2: mod_base = OTHER; note = 2'-O-methylguanosine with a 3'-phosphorothioate linkage
  modified_base 3: mod_base = um
  modified_base 4: mod_base = um
  modified_base 5: mod_base = gm
  modified_base 6: mod_base = OTHER; note = 2'-O-methyladenosine
  modified_base 7: mod_base = OTHER; note = 2'-fluorocytidine
  modified_base 8: mod_base = um
  modified_base 9: mod_base = OTHER; note = 2'-fluorouridine
  modified_base 10: mod_base = OTHER; note = 2'-fluoroguanosine
  modified_base 11: mod_base = OTHER; note = 2'-fluoroadenosine
  modified_base 12: mod_base = gm
  modified_base 13: mod_base = um
  modified_base 14: mod_base = OTHER; note = 2'-O-methyladenosine
  modified_base 15: mod_base = OTHER; note = 2'-O-methyladenosine
  modified_base 16: mod_base = OTHER; note = 2'-O-methyladenosine
  modified_base 17: mod_base = um
  modified_base 18: mod_base = OTHER; note = 2'-O-methyladenosine
  modified_base 19: mod_base = OTHER; note = 2'-O-methyluridine with a 3'-phosphorothioate linkage
  modified_base 20: mod_base = OTHER; note = 2'-O-methyladenosine with a 3'-phosphorothioate linkage
  modified_base 21: mod_base = OTHER; note = 2'-O-methyladenosine
tgttgacttgagtaaatataa

SEQ ID NO: 597 - RNA, 23 nt, synthetic construct
  source 1..23: mol_type = other RNA
  modified_base 1: mod_base = OTHER; note = 2'-O-methyluridine with a 3'-phosphorothioate linkage
  modified_base 2: mod_base = OTHER; note = 2'-fluorouridine with a 3'-phosphorothioate linkage
  modified_base 3: mod_base = OTHER; note = 2'-O-methyladenosine
  modified_base 4: mod_base = um
  modified_base 5: mod_base = OTHER; note = 2'-O-methyladenosine
  modified_base 6: mod_base = OTHER; note = 2'-fluorouridine
  modified_base 7: mod_base = um
  modified_base 8: mod_base = um
  modified_base 9: mod_base = OTHER; note = 2'-O-methyladenosine
  modified_base 10: mod_base = cm
  modified_base 11: mod_base = um
  modified_base 12: mod_base = cm
  modified_base 13: mod_base = OTHER; note = 2'-O-methyladenosine
  modified_base 14: mod_base = OTHER; note = 2'-fluoroadenosine
  modified_base 15: mod_base = gm
  modified_base 16: mod_base = OTHER; note = 2'-fluorouridine
  modified_base 17: mod_base = cm
  modified_base 18: mod_base = OTHER; note = 2'-O-methyladenosine
  modified_base 19: mod_base = OTHER; note = 2'-O-methyladenosine
  modified_base 20: mod_base = cm
  modified_base 21: mod_base = OTHER; note = 2'-O-methyladenosine with a 3'-phosphorothioate linkage
  modified_base 22: mod_base = OTHER; note = 2'-O-methyluridine with a 3'-phosphorothioate linkage
  modified_base 23: mod_base = cm
ttatatttactcaagtcaacatc

SEQ ID NO: 598 - RNA, 21 nt, synthetic construct
  source 1..21: mol_type = other RNA
  modified_base 1: mod_base = OTHER; note = 2'-O-methylguanosine with a 3'-phosphorothioate linkage
  modified_base 2: mod_base = OTHER; note = 2'-O-methylcytidine with a 3'-phosphorothioate linkage
  modified_base 3: mod_base = cm
  modified_base 4: mod_base = OTHER; note = 2'-O-methyladenosine
  modified_base 5: mod_base = OTHER; note = 2'-O-methyladenosine
  modified_base 6: mod_base = OTHER; note = 2'-O-methyladenosine
  modified_base 7: mod_base = OTHER; note = 2'-fluoroadenosine
  modified_base 8: mod_base = um
  modified_base 9: mod_base = OTHER; note = 2'-fluoroadenosine
  modified_base 10: mod_base = OTHER; note = 2'-fluoroguanosine
  modified_base 11: mod_base = OTHER; note = 2'-fluoroadenosine
  modified_base 12: mod_base = um
  modified_base 13: mod_base = gm
  modified_base 14: mod_base = OTHER; note = 2'-O-methyladenosine
  modified_base 15: mod_base = gm
  modified_base 16: mod_base = OTHER; note = 2'-O-methyladenosine
  modified_base 17: mod_base = um
  modified_base 18: mod_base = cm
  modified_base 19: mod_base = OTHER; note = 2'-O-methyladenosine with a 3'-phosphorothioate linkage
  modified_base 20: mod_base = OTHER; note = 2'-O-methyladenosine with a 3'-phosphorothioate linkage
  modified_base 21: mod_base = OTHER; note = 2'-O-methyladenosine
gccaaaatagatgagatcaaa

SEQ ID NO: 599 - RNA, 23 nt, synthetic construct
  source 1..23: mol_type = other RNA
  modified_base 1: mod_base = OTHER; note = 2'-O-methyluridine with a 3'-phosphorothioate linkage
  modified_base 2: mod_base = OTHER; note = 2'-fluorouridine with a 3'-phosphorothioate linkage
  modified_base 3: mod_base = um
  modified_base 4: mod_base = gm
  modified_base 5: mod_base = OTHER; note = 2'-O-methyladenosine
  modified_base 6: mod_base = OTHER; note = 2'-fluorouridine
  modified_base 7: mod_base = cm
  modified_base 8: mod_base = um
  modified_base 9: mod_base = cm
  modified_base 10: mod_base = OTHER; note = 2'-O-methyladenosine
  modified_base 11: mod_base = um
  modified_base 12: mod_base = cm
  modified_base 13: mod_base = um
  modified_base 14: mod_base = OTHER; note = 2'-fluoroadenosine
  modified_base 15: mod_base = um
  modified_base 16: mod_base = OTHER; note = 2'-fluorouridine
  modified_base 17: mod_base = um
  modified_base 18: mod_base = um
  modified_base 19: mod_base = gm
  modified_base 20: mod_base = gm
  modified_base 21: mod_base = OTHER; note = 2'-O-methylcytidine with a 3'-phosphorothioate linkage
  modified_base 22: mod_base = OTHER; note = 2'-O-methyluridine with a 3'-phosphorothioate linkage
  modified_base 23: mod_base = um
tttgatctcatctattttggctt

SEQ ID NO: 600 - RNA, 21 nt, synthetic construct
  source 1..21: mol_type = other RNA
  modified_base 1: mod_base = OTHER; note = 2'-O-methyladenosine with a 3'-phosphorothioate linkage
  modified_base 2: mod_base = OTHER; note = 2'-O-methyladenosine with a 3'-phosphorothioate linkage
  modified_base 3: mod_base = um
  modified_base 4: mod_base = gm
  modified_base 5: mod_base = cm
  modified_base 6: mod_base = OTHER; note = 2'-O-methyladenosine
  modified_base 7: mod_base = OTHER; note = 2'-fluoroguanosine
  modified_base 8: mod_base = OTHER; note = 2'-O-methyladenosine
  modified_base 9: mod_base = OTHER; note = 2'-fluoroadenosine
  modified_base 10: mod_base = OTHER; note = 2'-fluoroguanosine
  modified_base 11: mod_base = OTHER; note = 2'-fluoroadenosine
  modified_base 12: mod_base = um
  modified_base 13: mod_base = gm
  modified_base 14: mod_base = um
  modified_base 15: mod_base = OTHER; note = 2'-O-methyladenosine
  modified_base 16: mod_base = gm
  modified_base 17: mod_base = OTHER; note = 2'-O-methyladenosine
  modified_base 18: mod_base = um
  modified_base 19: mod_base = OTHER; note = 2'-O-methyluridine with a 3'-phosphorothioate linkage
  modified_base 20: mod_base = OTHER; note = 2'-O-methylguanosine with a 3'-phosphorothioate linkage
  modified_base 21: mod_base = OTHER; note = 2'-O-methyladenosine
aatgcagaagatgtagattga

SEQ ID NO: 601 - RNA, 23 nt, synthetic construct
  source 1..23: mol_type = other RNA
  modified_base 1: mod_base = OTHER; note = 2'-O-methyluridine with a 3'-phosphorothioate linkage
  modified_base 2: mod_base = OTHER; note = 2'-fluorocytidine with a 3'-phosphorothioate linkage
  modified_base 3: mod_base = OTHER; note = 2'-O-methyladenosine
  modified_base 4: mod_base = OTHER; note = 2'-O-methyladenosine
  modified_base 5: mod_base = um
  modified_base 6: mod_base = OTHER; note = 2'-fluorocytidine
  modified_base 7: mod_base = um
  modified_base 8: mod_base = OTHER; note = 2'-O-methyladenosine
  modified_base 9: mod_base = cm
  modified_base 10: mod_base = OTHER; note = 2'-O-methyladenosine
  modified_base 11: mod_base = um
  modified_base 12: mod_base = cm
  modified_base 13: mod_base = um
  modified_base 14: mod_base = OTHER; note = 2'-fluorouridine
  modified_base 15: mod_base = cm
  modified_base 16: mod_base = OTHER; note = 2'-fluorouridine
  modified_base 17: mod_base = gm
  modified_base 18: mod_base = cm
  modified_base 19: mod_base = OTHER; note = 2'-O-methyladenosine
  modified_base 20: mod_base = um
  modified_base 21: mod_base = OTHER; note = 2'-O-methyluridine with a 3'-phosphorothioate linkage
  modified_base 22: mod_base = OTHER; note = 2'-O-methyluridine with a 3'-phosphorothioate linkage
  modified_base 23: mod_base = gm
tcaatctacatcttctgcatttg

SEQ ID NO: 602 - RNA, 21 nt, synthetic construct
  source 1..21: mol_type = other RNA
  modified_base 1: mod_base = OTHER; note = 2'-O-methylguanosine with a 3'-phosphorothioate linkage
  modified_base 2: mod_base = OTHER; note = 2'-O-methylcytidine with a 3'-phosphorothioate linkage
  modified_base 3: mod_base = um
  modified_base 4: mod_base = um
  modified_base 5: mod_base = um
  modified_base 6: mod_base = gm
  modified_base 7: mod_base = OTHER; note = 2'-fluorouridine
  modified_base 8: mod_base = um
  modified_base 9: mod_base = OTHER; note = 2'-fluorocytidine
  modified_base 10: mod_base = OTHER; note = 2'-fluoroguanosine
  modified_base 11: mod_base = OTHER; note = 2'-fluoroadenosine
  modified_base 12: mod_base = OTHER; note = 2'-O-methyladenosine
  modified_base 13: mod_base = OTHER; note = 2'-O-methyladenosine
  modified_base 14: mod_base = gm
  modified_base 15: mod_base = OTHER; note = 2'-O-methyladenosine
  modified_base 16: mod_base = OTHER; note = 2'-O-methyladenosine
  modified_base 17: mod_base = um
  modified_base 18: mod_base = gm
  modified_base 19: mod_base = OTHER; note = 2'-O-methylguanosine with a 3'-phosphorothioate linkage
  modified_base 20: mod_base = OTHER; note = 2'-O-methyluridine with a 3'-phosphorothioate linkage
  modified_base 21: mod_base = OTHER; note = 2'-O-methyladenosine
gctttgttcgaaagaatggta

SEQ ID NO: 603 - RNA, 23 nt, synthetic construct
  source 1..23: mol_type = other RNA
  modified_base 1: mod_base = OTHER; note = 2'-O-methyluridine with a 3'-phosphorothioate linkage
  modified_base 2: mod_base = OTHER; note = 2'-fluoroadenosine with a 3'-phosphorothioate linkage
  modified_base 3: mod_base = cm
  modified_base 4: mod_base = cm
  modified_base 5: mod_base = OTHER; note = 2'-O-methyladenosine
  modified_base 6: mod_base = OTHER; note = 2'-fluorouridine
  modified_base 7: mod_base = um
  modified_base 8: mod_base = cm
  modified_base 9: mod_base = um
  modified_base 10: mod_base = um
  modified_base 11: mod_base = um
  modified_base 12: mod_base = cm
  modified_base 13: mod_base = gm
  modified_base 14: mod_base = OTHER; note = 2'-fluoroadenosine
  modified_base 15: mod_base = OTHER; note = 2'-O-methyladenosine
  modified_base 16: mod_base = OTHER; note = 2'-fluorocytidine
  modified_base 17: mod_base = OTHER; note = 2'-O-methyladenosine
  modified_base 18: mod_base = OTHER; note = 2'-O-methyladenosine
  modified_base 19: mod_base = OTHER; note = 2'-O-methyladenosine
  modified_base 20: mod_base = gm
  modified_base 21: mod_base = OTHER; note = 2'-O-methylcytidine with a 3'-phosphorothioate linkage
  modified_base 22: mod_base = OTHER; note = 2'-O-methylcytidine with a 3'-phosphorothioate linkage
  modified_base 23: mod_base = um
taccattctttcgaacaaagcct

SEQ ID NO: 604 - RNA, 21 nt, synthetic construct
  source 1..21: mol_type = other RNA
  modified_base 1: mod_base = OTHER; note = 2'-O-methylguanosine with a 3'-phosphorothioate linkage
  modified_base 2: mod_base = OTHER; note = 2'-O-methyladenosine with a 3'-phosphorothioate linkage
  modified_base 3: mod_base = cm
  modified_base 4: mod_base = um
  modified_base 5: mod_base = um
  modified_base 6: mod_base = gm
  modified_base 7: mod_base = OTHER; note = 2'-fluoroadenosine
  modified_base 8: mod_base = gm
  modified_base 9: mod_base = OTHER; note = 2'-fluorouridine
  modified_base 10: mod_base = OTHER; note = 2'-fluoroadenosine
  modified_base 11: mod_base = OTHER; note = 2'-fluoroadenosine
  modified_base 12: mod_base = OTHER; note = 2'-O-methyladenosine
  modified_base 13: mod_base = um
  modified_base 14: mod_base = OTHER; note = 2'-O-methyladenosine
  modified_base 15: mod_base = um
  modified_base 16: mod_base = OTHER; note = 2'-O-methyladenosine
  modified_base 17: mod_base = um
  modified_base 18: mod_base = cm
  modified_base 19: mod_base = OTHER; note = 2'-O-methyladenosine with a 3'-phosphorothioate linkage
  modified_base 20: mod_base = OTHER; note = 2'-O-methylcytidine with a 3'-phosphorothioate linkage
  modified_base 21: mod_base = OTHER; note = 2'-O-methyladenosine
gacttgagtaaatatatcaca

SEQ ID NO: 605 - RNA, 23 nt, synthetic construct
  source 1..23: mol_type = other RNA
  modified_base 1: mod_base = OTHER; note = 2'-O-methyluridine with a 3'-phosphorothioate linkage
  modified_base 2: mod_base = OTHER; note = 2'-fluoroguanosine with a 3'-phosphorothioate linkage
  modified_base 3: mod_base = um
  modified_base 4: mod_base = gm
  modified_base 5: mod_base = OTHER; note = 2'-O-methyladenosine
  modified_base 6: mod_base = OTHER; note = 2'-fluorouridine
  modified_base 7: mod_base = OTHER; note = 2'-O-methyladenosine
  modified_base 8: mod_base = um
  modified_base 9: mod_base = OTHER; note = 2'-O-methyladenosine
  modified_base 10: mod_base = um
  modified_base 11: mod_base = um
  modified_base 12: mod_base = um
  modified_base 13: mod_base = OTHER; note = 2'-O-methyladenosine
  modified_base 14: mod_base = OTHER; note = 2'-fluorocytidine
  modified_base 15: mod_base = um
  modified_base 16: mod_base = OTHER; note = 2'-fluorocytidine
  modified_base 17: mod_base = OTHER; note = 2'-O-methyladenosine
  modified_base 18: mod_base = OTHER; note = 2'-O-methyladenosine
  modified_base 19: mod_base = gm
  modified_base 20: mod_base = um
  modified_base 21: mod_base = OTHER; note = 2'-O-methylcytidine with a 3'-phosphorothioate linkage
  modified_base 22: mod_base = OTHER; note = 2'-O-methyladenosine with a 3'-phosphorothioate linkage
  modified_base 23: mod_base = OTHER; note = 2'-O-methyladenosine
tgtgatatatttactcaagtcaa

SEQ ID NO: 606 - RNA, 21 nt, synthetic construct
  source 1..21: mol_type = other RNA
  modified_base 1: mod_base = OTHER; note = 2'-O-methyladenosine with a 3'-phosphorothioate linkage
  modified_base 2: mod_base = OTHER; note = 2'-O-methylguanosine with a 3'-phosphorothioate linkage
  modified_base 3: mod_base = OTHER; note = 2'-O-methyladenosine
  modified_base 4: mod_base = um
  modified_base 5: mod_base = gm
  modified_base 6: mod_base = OTHER; note = 2'-O-methyladenosine
  modified_base 7: mod_base = OTHER; note = 2'-fluoroguanosine
  modified_base 8: mod_base = OTHER; note = 2'-O-methyladenosine
  modified_base 9: mod_base = OTHER; note = 2'-fluorouridine
  modified_base 10: mod_base = OTHER; note = 2'-fluorocytidine
  modified_base 11: mod_base = OTHER; note = 2'-fluoroadenosine
  modified_base 12: mod_base = OTHER; note = 2'-O-methyladenosine
  modified_base 13: mod_base = gm
  modified_base 14: mod_base = OTHER; note = 2'-O-methyladenosine
  modified_base 15: mod_base = OTHER; note = 2'-O-methyladenosine
  modified_base 16: mod_base = um
  modified_base 17: mod_base = gm
  modified_base 18: mod_base = OTHER; note = 2'-O-methyladenosine
  modified_base 19: mod_base = OTHER; note = 2'-O-methylcytidine with a 3'-phosphorothioate linkage
  modified_base 20: mod_base = OTHER; note = 2'-O-methyladenosine with a 3'-phosphorothioate linkage
  modified_base 21: mod_base = OTHER; note = 2'-O-methyladenosine
agatgagatcaagaatgacaa

SEQ ID NO: 607 - RNA, 23 nt, synthetic construct
  source 1..23: mol_type = other RNA
  modified_base 1: mod_base = OTHER; note = 2'-O-methyluridine with a 3'-phosphorothioate linkage
  modified_base 2: mod_base = OTHER; note = 2'-fluorouridine with a 3'-phosphorothioate linkage
  modified_base 3: mod_base = gm
  modified_base 4: mod_base = um
  modified_base 5: mod_base = cm
  modified_base 6: mod_base = OTHER; note = 2'-fluoroadenosine
  modified_base 7: mod_base = um
  modified_base 8: mod_base = um
  modified_base 9: mod_base = cm
  modified_base 10: mod_base = um
  modified_base 11: mod_base = um
  modified_base 12: mod_base = gm
  modified_base 13: mod_base = OTHER; note = 2'-O-methyladenosine
  modified_base 14: mod_base = OTHER; note = 2'-fluorouridine
  modified_base 15: mod_base = cm
  modified_base 16: mod_base = OTHER; note = 2'-fluorouridine
  modified_base 17: mod_base = cm
  modified_base 18: mod_base = OTHER; note = 2'-O-methyladenosine
  modified_base 19: mod_base = um
  modified_base 20: mod_base = cm
  modified_base 21: mod_base = OTHER; note = 2'-O-methyluridine with a 3'-phosphorothioate linkage
  modified_base 22: mod_base = OTHER; note = 2'-O-methyladenosine with a 3'-phosphorothioate linkage
  modified_base 23: mod_base = um
ttgtcattcttgatctcatctat

SEQ ID NO: 608 - RNA, 21 nt, synthetic construct
  source 1..21: mol_type = other RNA
  modified_base 1: mod_base = OTHER; note = 2'-O-methyluridine with a 3'-phosphorothioate linkage
  modified_base 2: mod_base = OTHER; note = 2'-O-methyluridine with a 3'-phosphorothioate linkage
  modified_base 3: mod_base = gm
  modified_base 4: mod_base = OTHER; note = 2'-O-methyladenosine
  modified_base 5: mod_base = gm
  modified_base 6: mod_base = um
  modified_base 7: mod_base = OTHER; note = 2'-fluoroadenosine
  modified_base 8: mod_base = OTHER; note = 2'-O-methyladenosine
  modified_base 9: mod_base = OTHER; note = 2'-fluoroadenosine
  modified_base 10: mod_base = OTHER; note = 2'-fluorouridine
  modified_base 11: mod_base = OTHER; note = 2'-fluoroadenosine
  modified_base 12: mod_base = um
  modified_base 13: mod_base = OTHER; note = 2'-O-methyladenosine
  modified_base 14: mod_base = um
  modified_base 15: mod_base = cm
  modified_base 16: mod_base = OTHER; note = 2'-O-methyladenosine
  modified_base 17: mod_base = cm
  modified_base 18: mod_base = cm
  modified_base 19: mod_base = OTHER; note = 2'-O-methyladenosine with a 3'-phosphorothioate linkage
  modified_base 20: mod_base = OTHER; note = 2'-O-methylcytidine with a 3'-phosphorothioate linkage
  modified_base 21: mod_base = OTHER; note = 2'-O-methyladenosine
ttgagtaaatatatcaccaca

SEQ ID NO: 609 - RNA, 23 nt, synthetic construct
  source 1..23: mol_type = other RNA
  modified_base 1: mod_base = OTHER; note = 2'-O-methyluridine with a 3'-phosphorothioate linkage
  modified_base 2: mod_base = OTHER; note = 2'-fluoroguanosine with a 3'-phosphorothioate linkage
  modified_base 3: mod_base = um
  modified_base 4: mod_base = gm
  modified_base 5: mod_base = gm
  modified_base 6: mod_base = OTHER; note = 2'-fluorouridine
  modified_base 7: mod_base = gm
  modified_base 8: mod_base = OTHER; note = 2'-O-methyladenosine
  modified_base 9: mod_base = um
  modified_base 10: mod_base = OTHER; note = 2'-O-methyladenosine
  modified_base 11: mod_base = um
  modified_base 12: mod_base = OTHER; note = 2'-O-methyladenosine
  modified_base 13: mod_base = um
  modified_base 14: mod_base = OTHER; note = 2'-fluorouridine
  modified_base 15: mod_base = um
  modified_base 16: mod_base = OTHER; note = 2'-fluoroadenosine
  modified_base 17: mod_base = cm
  modified_base 18: mod_base = um
  modified_base 19: mod_base = cm
  modified_base 20: mod_base = OTHER; note = 2'-O-methyladenosine
  modified_base 21: mod_base = OTHER; note = 2'-O-methyladenosine with a 3'-phosphorothioate linkage
  modified_base 22: mod_base = OTHER; note = 2'-O-methylguanosine with a 3'-phosphorothioate linkage
  modified_base 23: mod_base = um
tgtggtgatatatttactcaagt

SEQ ID NO: 610 - RNA, 21 nt, synthetic construct
  source 1..21: mol_type = other RNA
  modified_base 1: mod_base = OTHER; note = 2'-O-methyladenosine with a 3'-phosphorothioate linkage
  modified_base 2: mod_base = OTHER; note = 2'-O-methyladenosine with a 3'-phosphorothioate linkage
  modified_base 3: mod_base = um
  modified_base 4: mod_base = OTHER; note = 2'-O-methyladenosine
  modified_base 5: mod_base = gm
  modified_base 6: mod_base = OTHER; note = 2'-O-methyladenosine
  modified_base 7: mod_base = OTHER; note = 2'-fluorouridine
  modified_base 8: mod_base = gm
  modified_base 9: mod_base = OTHER; note = 2'-fluoroadenosine
  modified_base 10: mod_base = OTHER; note = 2'-fluoroguanosine
  modified_base 11: mod_base = OTHER; note = 2'-fluoroadenosine
  modified_base 12: mod_base = um
  modified_base 13: mod_base = cm
  modified_base 14: mod_base = OTHER; note = 2'-O-methyladenosine
  modified_base 15: mod_base = OTHER; note = 2'-O-methyladenosine
  modified_base 16: mod_base = gm
  modified_base 17: mod_base = OTHER; note = 2'-O-methyladenosine
  modified_base 18: mod_base = OTHER; note = 2'-O-methyladenosine
  modified_base 19: mod_base = OTHER; note = 2'-O-methyluridine with a 3'-phosphorothioate linkage
  modified_base 20: mod_base = OTHER; note = 2'-O-methylguanosine with a 3'-phosphorothioate linkage
  modified_base 21: mod_base = OTHER; note = 2'-O-methyladenosine
aatagatgagatcaagaatga

SEQ ID NO: 611 - RNA, 23 nt, synthetic construct
  source 1..23: mol_type = other RNA
  modified_base 1: mod_base = OTHER; note = 2'-O-methyluridine with a 3'-phosphorothioate linkage
  modified_base 2: mod_base = OTHER; note = 2'-fluorocytidine with a 3'-phosphorothioate linkage
  modified_base 3: mod_base = OTHER; note = 2'-O-methyladenosine
  modified_base 4: mod_base = um
  modified_base 5: mod_base = um
  modified_base 6: mod_base = OTHER; note = 2'-fluorocytidine
  modified_base 7: mod_base = um
  modified_base 8: mod_base = um
  modified_base 9: mod_base = gm
  modified_base 10: mod_base = OTHER; note = 2'-O-methyladenosine
  modified_base 11: mod_base = um
  modified_base 12: mod_base = cm
  modified_base 13: mod_base = um
  modified_base 14: mod_base = OTHER; note = 2'-fluorocytidine
  modified_base 15: mod_base = OTHER; note = 2'-O-methyladenosine
  modified_base 16: mod_base = OTHER; note = 2'-fluorouridine
  modified_base 17: mod_base = cm
  modified_base 18: mod_base = um
  modified_base 19: mod_base = OTHER; note = 2'-O-methyladenosine
  modified_base 20: mod_base = um
  modified_base 21: mod_base = OTHER; note = 2'-O-methyluridine with a 3'-phosphorothioate linkage
  modified_base 22: mod_base = OTHER; note = 2'-O-methyluridine with a 3'-phosphorothioate linkage
  modified_base 23: mod_base = um
tcattcttgatctcatctatttt

SEQ ID NO: 612 - RNA, 21 nt, synthetic construct
  source 1..21: mol_type = other RNA
  modified_base 1: mod_base = OTHER; note = 2'-O-methylcytidine with a 3'-phosphorothioate linkage
  modified_base 2: mod_base = OTHER; note = 2'-O-methyluridine with a 3'-phosphorothioate linkage
  modified_base 3: mod_base = um
  modified_base 4: mod_base = um
  modified_base 5: mod_base = gm
  modified_base 6: mod_base = um
  modified_base 7: mod_base = OTHER; note = 2'-fluorouridine
  modified_base 8: mod_base = cm
  modified_base 9: mod_base = OTHER; note = 2'-fluoroguanosine
  modified_base 10: mod_base = OTHER; note = 2'-fluoroadenosine
  modified_base 11: mod_base = OTHER; note = 2'-fluoroadenosine
  modified_base 12: mod_base = OTHER; note = 2'-O-methyladenosine
  modified_base 13: mod_base = gm
  modified_base 14: mod_base = OTHER; note = 2'-O-methyladenosine
  modified_base 15: mod_base = OTHER; note = 2'-O-methyladenosine
  modified_base 16: mod_base = um
  modified_base 17: mod_base = gm
  modified_base 18: mod_base = gm
  modified_base 19: mod_base = OTHER; note = 2'-O-methyluridine with a 3'-phosphorothioate linkage
  modified_base 20: mod_base = OTHER; note = 2'-O-methylguanosine with a 3'-phosphorothioate linkage
  modified_base 21: mod_base = OTHER; note = 2'-O-methyladenosine
ctttgttcgaaagaatggtga

SEQ ID NO: 613 - RNA, 23 nt, synthetic construct
  source 1..23: mol_type = other RNA
  modified_base 1: mod_base = OTHER; note = 2'-O-methyluridine with a 3'-phosphorothioate linkage
  modified_base 2: mod_base = OTHER; note = 2'-fluorocytidine with a 3'-phosphorothioate linkage
  modified_base 3: mod_base = OTHER; note = 2'-O-methyladenosine
  modified_base 4: mod_base = cm
  modified_base 5: mod_base = cm
  modified_base 6: mod_base = OTHER; note = 2'-fluoroadenosine
  modified_base 7: mod_base = um
  modified_base 8: mod_base = um
  modified_base 9: mod_base = cm
  modified_base 10: mod_base = um
  modified_base 11: mod_base = um
  modified_base 12: mod_base = um
  modified_base 13: mod_base = cm
  modified_base 14: mod_base = OTHER; note = 2'-fluoroguanosine
  modified_base 15: mod_base = OTHER; note = 2'-O-methyladenosine
  modified_base 16: mod_base = OTHER; note = 2'-fluoroadenosine
  modified_base 17: mod_base = cm
  modified_base 18: mod_base = OTHER; note = 2'-O-methyladenosine
  modified_base 19: mod_base = OTHER; note = 2'-O-methyladenosine
  modified_base 20: mod_base = OTHER; note = 2'-O-methyladenosine
  modified_base 21: mod_base = OTHER; note = 2'-O-methylguanosine with a 3'-phosphorothioate linkage
  modified_base 22: mod_base = OTHER; note = 2'-O-methylcytidine with a 3'-phosphorothioate linkage
  modified_base 23: mod_base = cm
tcaccattctttcgaacaaagcc

SEQ ID NO: 614 - RNA, 21 nt, synthetic construct
  source 1..21: mol_type = other RNA
  modified_base 1: mod_base = OTHER; note = 2'-O-methyluridine with a 3'-phosphorothioate linkage
  modified_base 2: mod_base = OTHER; note = 2'-O-methylguanosine with a 3'-phosphorothioate linkage
  modified_base 3: mod_base = um
  modified_base 4: mod_base = gm
  modified_base 5: mod_base = OTHER; note = 2'-O-methyladenosine
  modified_base 6: mod_base = um
  modified_base 7: mod_base = OTHER; note = 2'-fluoroguanosine
  modified_base 8: mod_base = OTHER; note = 2'-O-methyladenosine
  modified_base 9: mod_base = OTHER; note = 2'-fluoroadenosine
  modified_base 10: mod_base = OTHER; note = 2'-fluoroguanosine
  modified_base 11: mod_base = OTHER; note = 2'-fluoroguanosine
  modified_base 12: mod_base = OTHER; note = 2'-O-methyladenosine
  modified_base 13: mod_base = cm
  modified_base 14: mod_base = OTHER; note = 2'-O-methyladenosine
  modified_base 15: mod_base = um
  modified_base 16: mod_base = gm
  modified_base 17: mod_base = gm
  modified_base 18: mod_base = cm
  modified_base 19: mod_base = OTHER; note = 2'-O-methyluridine with a 3'-phosphorothioate linkage
  modified_base 20: mod_base = OTHER; note = 2'-O-methyluridine with a 3'-phosphorothioate linkage
  modified_base 21: mod_base = OTHER; note = 2'-O-methyladenosine
tgtgatgaaggacatggctta

SEQ ID NO: 615 - RNA, 23 nt, synthetic construct
  source 1..23: mol_type = other RNA
  modified_base 1: mod_base = OTHER; note = 2'-O-methyluridine with a 3'-phosphorothioate linkage
  modified_base 2: mod_base = OTHER; note = 2'-fluoroadenosine with a 3'-phosphorothioate linkage
  modified_base 3: mod_base = OTHER; note = 2'-O-methyladenosine
  modified_base 4: mod_base = gm
  modified_base 5: mod_base = cm
  modified_base 6: mod_base = OTHER; note = 2'-fluorocytidine
  modified_base 7: mod_base = OTHER; note = 2'-O-methyladenosine
  modified_base 8: mod_base = um
  modified_base 9: mod_base = gm
  modified_base 10: mod_base = um
  modified_base 11: mod_base = cm
  modified_base 12: mod_base = cm
  modified_base 13: mod_base = um
  modified_base 14: mod_base = OTHER; note = 2'-fluorouridine
  modified_base 15: mod_base = cm
  modified_base 16: mod_base = OTHER; note = 2'-fluoroadenosine
  modified_base 17: mod_base = um
  modified_base 18: mod_base = cm
  modified_base 19: mod_base = OTHER; note = 2'-O-methyladenosine
  modified_base 20: mod_base = cm
  modified_base 21: mod_base = OTHER; note = 2'-O-methyladenosine with a 3'-phosphorothioate linkage
  modified_base 22: mod_base = OTHER; note = 2'-O-methylcytidine with a 3'-phosphorothioate linkage
  modified_base 23: mod_base = OTHER; note = 2'-O-methyladenosine
taagccatgtccttcatcacaca

SEQ ID NO: 616 - RNA, 21 nt, synthetic construct
  source 1..21: mol_type = other RNA
  modified_base 1: mod_base = OTHER; note = 2'-O-methyluridine with a 3'-phosphorothioate linkage
  modified_base 2: mod_base = OTHER; note = 2'-O-methylguanosine with a 3'-phosphorothioate linkage
  modified_base 3: mod_base = OTHER; note = 2'-O-methyladenosine
  modified_base 4: mod_base = cm
  modified_base 5: mod_base = um
  modified_base 6: mod_base = um
  modified_base 7: mod_base = OTHER; note = 2'-fluoroguanosine
  modified_base 8: mod_base = OTHER; note = 2'-O-methyladenosine
  modified_base 9: mod_base = OTHER; note = 2'-fluoroguanosine
  modified_base 10: mod_base = OTHER; note = 2'-fluorouridine
  modified_base 11: mod_base = OTHER; note = 2'-fluoroadenosine
  modified_base 12: mod_base = OTHER; note = 2'-O-methyladenosine
  modified_base 13: mod_base = OTHER; note = 2'-O-methyladenosine
  modified_base 14: mod_base = um
  modified_base 15: mod_base = OTHER; note = 2'-O-methyladenosine
  modified_base 16: mod_base = um
  modified_base 17: mod_base = OTHER; note = 2'-O-methyladenosine
  modified_base 18: mod_base = um
  modified_base 19: mod_base = OTHER; note = 2'-O-methylcytidine with a 3'-phosphorothioate linkage
  modified_base 20: mod_base = OTHER; note = 2'-O-methyladenosine with a 3'-phosphorothioate linkage
  modified_base 21: mod_base = OTHER; note = 2'-O-methyladenosine
tgacttgagtaaatatatcaa

SEQ ID NO: 617 - RNA, 23 nt, synthetic construct
  source 1..23: mol_type = other RNA
  modified_base 1: mod_base = OTHER; note = 2'-O-methyluridine with a 3'-phosphorothioate linkage
  modified_base 2: mod_base = OTHER; note = 2'-fluorouridine with a 3'-phosphorothioate linkage
  modified_base 3: mod_base = gm
  modified_base 4: mod_base = OTHER; note = 2'-O-methyladenosine
  modified_base 5: mod_base = um
  modified_base 6: mod_base = OTHER; note = 2'-fluoroadenosine
  modified_base 7: mod_base = um
  modified_base 8: mod_base = OTHER; note = 2'-O-methyladenosine
  modified_base 9: mod_base = um
  modified_base 10: mod_base = um
  modified_base 11: mod_base = um
  modified_base 12: mod_base = OTHER; note = 2'-O-methyladenosine
  modified_base 13: mod_base = cm
  modified_base 14: mod_base = OTHER; note = 2'-fluorouridine
  modified_base 15: mod_base = cm
  modified_base 16: mod_base = OTHER; note = 2'-fluoroadenosine
  modified_base 17: mod_base = OTHER; note = 2'-O-methyladenosine
  modified_base 18: mod_base = gm
  modified_base 19: mod_base = um
  modified_base 20: mod_base = cm
  modified_base 21: mod_base = OTHER; note = 2'-O-methyladenosine with a 3'-phosphorothioate linkage
  modified_base 22: mod_base = OTHER; note = 2'-O-methyladenosine with a 3'-phosphorothioate linkage
  modified_base 23: mod_base = cm
ttgatatatttactcaagtcaac

SEQ ID NO: 618 - RNA, 21 nt, synthetic construct
  source 1..21: mol_type = other RNA
  modified_base 1: mod_base = OTHER; note = 2'-O-methylguanosine with a 3'-phosphorothioate linkage
  modified_base 2: mod_base = OTHER; note = 2'-O-methyladenosine with a 3'-phosphorothioate linkage
  modified_base 3: mod_base = OTHER; note = 2'-O-methyladenosine
  modified_base 4: mod_base = OTHER; note = 2'-O-methyladenosine
  modified_base 5: mod_base = gm
  modified_base 6: mod_base = um
  modified_base 7: mod_base = OTHER; note = 2'-fluorouridine
  modified_base 8: mod_base = cm
  modified_base 9: mod_base = OTHER; note = 2'-fluoroadenosine
  modified_base 10: mod_base = OTHER; note = 2'-fluoroadenosine
  modified_base 11: mod_base = OTHER; note = 2'-fluorocytidine
  modified_base 12: mod_base = um
  modified_base 13: mod_base = gm
  modified_base 14: mod_base = cm
  modified_base 15: mod_base = um
  modified_base 16: mod_base = um
  modified_base 17: mod_base = cm
  modified_base 18: mod_base = gm
  modified_base 19: mod_base = OTHER; note = 2'-O-methyluridine with a 3'-phosphorothioate linkage
  modified_base 20: mod_base = OTHER; note = 2'-O-methyladenosine with a 3'-phosphorothioate linkage
  modified_base 21: mod_base = OTHER; note = 2'-O-methyladenosine
gaaagttcaactgcttcgtaa

SEQ ID NO: 619 - RNA, 23 nt, synthetic construct
  source 1..23: mol_type = other RNA
  modified_base 1: mod_base = OTHER; note = 2'-O-methyluridine with a 3'-phosphorothioate linkage
  modified_base 2: mod_base = OTHER; note = 2'-fluorouridine with a 3'-phosphorothioate linkage
  modified_base 3: mod_base = OTHER; note = 2'-O-methyladenosine
  modified_base 4: mod_base = cm
  modified_base 5: mod_base = gm
  modified_base 6: mod_base = OTHER; note = 2'-fluoroadenosine
  modified_base 7: mod_base = OTHER; note = 2'-O-methyladenosine
  modified_base 8: mod_base = gm
  modified_base 9: mod_base = cm
  modified_base 10: mod_base = OTHER; note = 2'-O-methyladenosine
  modified_base 11: mod_base = gm
  modified_base 12: mod_base = um
  modified_base 13: mod_base = um
  modified_base 14: mod_base = OTHER; note = 2'-fluoroguanosine
  modified_base 15: mod_base = OTHER; note = 2'-O-methyladenosine
  modified_base 16: mod_base = OTHER; note = 2'-fluoroadenosine
  modified_base 17: mod_base = cm
  modified_base 18: mod_base = um
  modified_base 19: mod_base = um
  modified_base 20: mod_base = um
  modified_base 21: mod_base = OTHER; note = 2'-O-methylcytidine with a 3'-phosphorothioate linkage
  modified_base 22: mod_base = OTHER; note = 2'-O-methyluridine with a 3'-phosphorothioate linkage
  modified_base 23: mod_base = gm
ttacgaagcagttgaactttctg

SEQ ID NO: 620 - RNA, 21 nt, synthetic construct
  source 1..21: mol_type = other RNA
  modified_base 1: mod_base = OTHER; note = 2'-O-methylguanosine with a 3'-phosphorothioate linkage
  modified_base 2: mod_base = OTHER; note = 2'-O-methylcytidine with a 3'-phosphorothioate linkage
  modified_base 3: mod_base = OTHER; note = 2'-O-methyladenosine
  modified_base 4: mod_base = gm
  modified_base 5: mod_base = OTHER; note = 2'-O-methyladenosine
  modified_base 6: mod_base = OTHER; note = 2'-O-methyladenosine
  modified_base 7: mod_base = OTHER; note = 2'-fluoroguanosine
  modified_base 8: mod_base = OTHER; note = 2'-O-methyladenosine
  modified_base 9: mod_base = OTHER; note = 2'-fluorouridine
  modified_base 10: mod_base = OTHER; note = 2'-fluoroguanosine
  modified_base 11: mod_base = OTHER; note = 2'-fluorouridine
  modified_base 12: mod_base = OTHER; note = 2'-O-methyladenosine
  modified_base 13: mod_base = gm
  modified_base 14: mod_base = OTHER; note = 2'-O-methyladenosine
  modified_base 15: mod_base = um
  modified_base 16: mod_base = um
  modified_base 17: mod_base = gm
  modified_base 18: mod_base = um
  modified_base 19: mod_base = OTHER; note = 2'-O-methylguanosine with a 3'-phosphorothioate linkage
  modified_base 20: mod_base = OTHER; note = 2'-O-methyluridine with a 3'-phosphorothioate linkage
  modified_base 21: mod_base = OTHER; note = 2'-O-methyladenosine
gcagaagatgtagattgtgta

SEQ ID NO: 621 - RNA, 23 nt, synthetic construct
  source 1..23: mol_type = other RNA
  modified_base 1: mod_base = OTHER; note = 2'-O-methyluridine with a 3'-phosphorothioate linkage
  modified_base 2: mod_base = OTHER; note = 2'-fluoroadenosine with a 3'-phosphorothioate linkage
  modified_base 3: mod_base = cm
  modified_base 4: mod_base = OTHER; note = 2'-O-methyladenosine
  modified_base 5: mod_base = cm
  modified_base 6: mod_base = OTHER; note = 2'-fluoroadenosine
  modified_base 7: mod_base = OTHER; note = 2'-O-methyladenosine
  modified_base 8: mod_base = um
  modified_base 9: mod_base = cm
  modified_base 10: mod_base = um
  modified_base 11: mod_base = OTHER; note = 2'-O-methyladenosine
  modified_base 12: mod_base = cm
  modified_base 13: mod_base = OTHER; note = 2'-O-methyladenosine
  modified_base 14: mod_base = OTHER; note = 2'-fluorouridine
  modified_base 15: mod_base = cm
  modified_base 16: mod_base = OTHER; note = 2'-fluorouridine
  modified_base 17: mod_base = um
  modified_base 18: mod_base = cm
  modified_base 19: mod_base = um
  modified_base 20: mod_base = gm
  modified_base 21: mod_base = OTHER; note = 2'-O-methylcytidine with a 3'-phosphorothioate linkage
  modified_base 22: mod_base = OTHER; note = 2'-O-methyladenosine with a 3'-phosphorothioate linkage
  modified_base 23: mod_base = um
tacacaatctacatcttctgcat

SEQ ID NO: 622 - RNA, 21 nt, synthetic construct
  source 1..21: mol_type = other RNA
  modified_base 1: mod_base = OTHER; note = 2'-O-methyluridine with a 3'-phosphorothioate linkage
  modified_base 2: mod_base = OTHER; note = 2'-O-methylguanosine with a 3'-phosphorothioate linkage
  modified_base 3: mod_base = um
  modified_base 4: mod_base = gm
  modified_base 5: mod_base = OTHER; note = 2'-O-methyladenosine
  modified_base 6: mod_base = OTHER; note = 2'-O-methyladenosine
  modified_base 7: mod_base = OTHER; note = 2'-fluorocytidine
  modified_base 8: mod_base = OTHER; note = 2'-O-methyladenosine
  modified_base 9: mod_base = OTHER; note = 2'-fluorocytidine
  modified_base 10: mod_base = OTHER; note = 2'-fluorouridine
  modified_base 11: mod_base = OTHER; note = 2'-fluoroguanosine
  modified_base 12: mod_base = um
  modified_base 13: mod_base = gm
  modified_base 14: mod_base = OTHER; note = 2'-O-methyladenosine
  modified_base 15: mod_base = cm
  modified_base 16: mod_base = cm
  modified_base 17: mod_base = cm
  modified_base 18: mod_base = um
  modified_base 19: mod_base = OTHER; note = 2'-O-methyluridine with a 3'-phosphorothioate linkage
  modified_base 20: mod_base = OTHER; note = 2'-O-methylguanosine with a 3'-phosphorothioate linkage
  modified_base 21: mod_base = OTHER; note = 2'-O-methyladenosine
tgtgaacactgtgacccttga

SEQ ID NO: 623 - RNA, 23 nt, synthetic construct
  source 1..23: mol_type = other RNA
  modified_base 1: mod_base = OTHER; note = 2'-O-methyluridine with a 3'-phosphorothioate linkage
  modified_base 2: mod_base = OTHER; note = 2'-fluorocytidine with a 3'-phosphorothioate linkage
  modified_base 3: mod_base = OTHER; note = 2'-O-methyladenosine
  modified_base 4: mod_base = OTHER; note = 2'-O-methyladenosine
  modified_base 5: mod_base = gm
  modified_base 6: mod_base = OTHER; note = 2'-fluoroguanosine
  modified_base 7: mod_base = gm
  modified_base 8: mod_base = um
  modified_base 9: mod_base = cm
  modified_base 10: mod_base = OTHER; note = 2'-O-methyladenosine
  modified_base 11: mod_base = cm
  modified_base 12: mod_base = OTHER; note = 2'-O-methyladenosine
  modified_base 13: mod_base = gm
  modified_base 14: mod_base = OTHER; note = 2'-fluorouridine
  modified_base 15: mod_base = gm
  modified_base 16: mod_base = OTHER; note = 2'-fluorouridine
  modified_base 17: mod_base = um
  modified_base 18: mod_base = cm
  modified_base 19: mod_base = OTHER; note = 2'-O-methyladenosine
  modified_base 20: mod_base = cm
  modified_base 21: mod_base = OTHER; note = 2'-O-methyladenosine with a 3'-phosphorothioate linkage
  modified_base 22: mod_base = OTHER; note = 2'-O-methyluridine with a 3'-phosphorothioate linkage
  modified_base 23: mod_base = OTHER; note = 2'-O-methyladenosine
tcaagggtcacagtgttcacata

SEQ ID NO: 624 - RNA, 21 nt, synthetic construct
  source 1..21: mol_type = other RNA
  modified_base 1: mod_base = OTHER; note = 2'-O-methylguanosine with a 3'-phosphorothioate linkage
  modified_base 2: mod_base = OTHER; note = 2'-O-methyladenosine with a 3'-phosphorothioate linkage
  modified_base 3: mod_base = cm
  modified_base 4: mod_base = OTHER; note = 2'-O-methyladenosine
  modified_base 5: mod_base = cm
  modified_base 6: mod_base = um
  modified_base 7: mod_base = OTHER; note = 2'-fluoroadenosine
  modified_base 8: mod_base = OTHER; note = 2'-O-methyladenosine
  modified_base 9: mod_base = OTHER; note = 2'-fluoroguanosine
  modified_base 10: mod_base = OTHER; note = 2'-fluorouridine
  modified_base 11: mod_base = OTHER; note = 2'-fluorocytidine
  modified_base 12: mod_base = OTHER; note = 2'-O-methyladenosine
  modified_base 13: mod_base = OTHER; note = 2'-O-methyladenosine
  modified_base 14: mod_base = gm
  modified_base 15: mod_base = um
  modified_base 16: mod_base = um
  modified_base 17: mod_base = OTHER; note = 2'-O-methyladenosine
  modified_base 18: mod_base = OTHER; note = 2'-O-methyladenosine
  modified_base 19: mod_base = OTHER; note = 2'-O-methyladenosine with a 3'-phosphorothioate linkage
  modified_base 20: mod_base = OTHER; note = 2'-O-methylguanosine with a 3'-phosphorothioate linkage
  modified_base 21: mod_base = OTHER; note = 2'-O-methyladenosine
gacactaagtcaagttaaaga

SEQ ID NO: 625 - RNA, 23 nt, synthetic construct
  source 1..23: mol_type = other RNA
  modified_base 1: mod_base = OTHER; note = 2'-O-methyluridine with a 3'-phosphorothioate linkage
  modified_base 2: mod_base = OTHER; note = 2'-fluorocytidine with a 3'-phosphorothioate linkage
  modified_base 3: mod_base = um
  modified_base 4: mod_base = um
  modified_base 5: mod_base = um
  modified_base 6: mod_base = OTHER; note = 2'-fluoroadenosine
  modified_base 7: mod_base = OTHER; note = 2'-O-methyladenosine
  modified_base 8: mod_base = cm
  modified_base 9: mod_base = um
  modified_base 10: mod_base = um
  modified_base 11: mod_base = gm
  modified_base 12: mod_base = OTHER; note = 2'-O-methyladenosine
  modified_base 13: mod_base = cm
  modified_base 14: mod_base = OTHER; note = 2'-fluorouridine
  modified_base 15: mod_base = um
  modified_base 16: mod_base = OTHER; note = 2'-fluoroadenosine
  modified_base 17: mod_base = gm
  modified_base 18: mod_base = um
  modified_base 19: mod_base = gm
  modified_base 20: mod_base = um
  modified_base 21: mod_base = OTHER; note = 2'-O-methylcytidine with a 3'-phosphorothioate linkage
  modified_base 22: mod_base = OTHER; note = 2'-O-methyladenosine with a 3'-phosphorothioate linkage
  modified_base 23: mod_base = um
tctttaacttgacttagtgtcat

SEQ ID NO: 626 - RNA, 21 nt, synthetic construct
  source 1..21: mol_type = other RNA
  modified_base 1: mod_base = OTHER; note = 2'-O-methylguanosine with a 3'-phosphorothioate linkage
  modified_base 2: mod_base = OTHER; note = 2'-O-methyladenosine with a 3'-phosphorothioate linkage
  modified_base 3: mod_base = OTHER; note = 2'-O-methyladenosine
  modified_base 4: mod_base = um
  modified_base 5: mod_base = OTHER; note = 2'-O-methyladenosine
  modified_base 6: mod_base = cm
  modified_base 7: mod_base = OTHER; note = 2'-fluorocytidine
  modified_base 8: mod_base = OTHER; note = 2'-O-methyladenosine
  modified_base 9: mod_base = OTHER; note = 2'-fluoroadenosine
  modified_base 10: mod_base = OTHER; note = 2'-fluoroguanosine
  modified_base 11: mod_base = OTHER; note = 2'-fluorouridine
  modified_base 12: mod_base = gm
  modified_base 13: mod_base = cm
  modified_base 14: mod_base = OTHER; note = 2'-O-methyladenosine
  modified_base 15: mod_base = gm
  modified_base 16: mod_base = OTHER; note = 2'-O-methyladenosine
  modified_base 17: mod_base = um
  modified_base 18: mod_base = gm
  modified_base 19: mod_base = OTHER; note = 2'-O-methyluridine with a 3'-phosphorothioate linkage
  modified_base 20: mod_base = OTHER; note = 2'-O-methyladenosine with a 3'-phosphorothioate linkage
  modified_base 21: mod_base = OTHER; note = 2'-O-methyladenosine
gaataccaagtgcagatgtaa

SEQ ID NO: 627 - RNA, 23 nt, synthetic construct
  source 1..23: mol_type = other RNA
  modified_base 1: mod_base = OTHER; note = 2'-O-methyluridine with a 3'-phosphorothioate linkage
  modified_base 2: mod_base = OTHER; note = 2'-fluorouridine with a 3'-phosphorothioate linkage
  modified_base 3: mod_base = OTHER; note = 2'-O-methyladenosine
  modified_base 4: mod_base = cm
  modified_base 5: mod_base = OTHER; note = 2'-O-methyladenosine
  modified_base 6: mod_base = OTHER; note = 2'-fluorouridine
  modified_base 7: mod_base = cm
  modified_base 8: mod_base = um
  modified_base 9: mod_base = gm
  modified_base 10: mod_base = cm
  modified_base 11: mod_base = OTHER; note = 2'-O-methyladenosine
  modified_base 12: mod_base = cm
  modified_base 13: mod_base = um
  modified_base 14: mod_base = OTHER; note = 2'-fluorouridine
  modified_base 15: mod_base = gm
  modified_base 16: mod_base = OTHER; note = 2'-fluoroguanosine
  modified_base 17: mod_base = um
  modified_base 18: mod_base = OTHER; note = 2'-O-methyladenosine
  modified_base 19: mod_base = um
  modified_base 20: mod_base = um
  modified_base 21: mod_base = OTHER; note = 2'-O-methylcytidine with a 3'-phosphorothioate linkage
  modified_base 22: mod_base = OTHER; note = 2'-O-methyluridine with a 3'-phosphorothioate linkage
  modified_base 23: mod_base = gm
ttacatctgcacttggtattctg

SEQ ID NO: 628 - RNA, 21 nt, synthetic construct
  source 1..21: mol_type = other RNA
  modified_base 1: mod_base = OTHER; note = 2'-O-methylguanosine with a 3'-phosphorothioate linkage
  modified_base 2: mod_base = OTHER; note = 2'-O-methyladenosine with a 3'-phosphorothioate linkage
  modified_base 3: mod_base = cm
  modified_base 4: mod_base = OTHER; note = 2'-O-methyladenosine
  modified_base 5: mod_base = OTHER; note = 2'-O-methyladenosine
  modified_base 6: mod_base = um
  modified_base 7: mod_base = OTHER; note = 2'-fluoroguanosine
  modified_base 8: mod_base = um
  modified_base 9: mod_base = OTHER; note = 2'-fluorocytidine
  modified_base 10: mod_base = OTHER; note = 2'-fluorocytidine
  modified_base 11: mod_base = OTHER; note = 2'-fluoroadenosine
  modified_base 12: mod_base = OTHER; note = 2'-O-methyladenosine
  modified_base 13: mod_base = gm
  modified_base 14: mod_base = OTHER; note = 2'-O-methyladenosine
  modified_base 15: mod_base = cm
  modified_base 16: mod_base = OTHER; note = 2'-O-methyladenosine
  modified_base 17: mod_base = cm
  modified_base 18: mod_base = OTHER; note = 2'-O-methyladenosine
  modified_base 19: mod_base = OTHER; note = 2'-O-methylguanosine with a 3'-phosphorothioate linkage
  modified_base 20: mod_base = OTHER; note = 2'-O-methylcytidine with a 3'-phosphorothioate linkage
  modified_base 21: mod_base = OTHER; note = 2'-O-methyladenosine
gacaatgtccaagacacagca

SEQ ID NO: 629 - RNA, 23 nt, synthetic construct
  source 1..23: mol_type = other RNA
  modified_base 1: mod_base = OTHER; note = 2'-O-methyluridine with a 3'-phosphorothioate linkage
  modified_base 2: mod_base = OTHER; note = 2'-fluoroguanosine with a 3'-phosphorothioate linkage
  modified_base 3: mod_base = cm
  modified_base 4: mod_base = um
  modified_base 5: mod_base = gm
  modified_base 6: mod_base = OTHER; note = 2'-fluorouridine
  modified_base 7: mod_base = gm
  modified_base 8: mod_base = um
  modified_base 9: mod_base = cm
  modified_base 10: mod_base = um
  modified_base 11: mod_base = um
  modified_base 12: mod_base = gm
  modified_base 13: mod_base = gm
  modified_base 14: mod_base = OTHER; note = 2'-fluoroadenosine
  modified_base 15: mod_base = cm
  modified_base 16: mod_base = OTHER; note = 2'-fluoroadenosine
  modified_base 17: mod_base = um
  modified_base 18: mod_base = um
  modified_base 19: mod_base = gm
  modified_base 20: mod_base = um
  modified_base 21: mod_base = OTHER; note = 2'-O-methylcytidine with a 3'-phosphorothioate linkage
  modified_base 22: mod_base = OTHER; note = 2'-O-methyladenosine with a 3'-phosphorothioate linkage
  modified_base 23: mod_base = um
tgctgtgtcttggacattgtcat

SEQ ID NO: 630 - RNA, 21 nt, synthetic construct
  source 1..21: mol_type = other RNA
  modified_base 1: mod_base = OTHER; note = 2'-O-methyladenosine with a 3'-phosphorothioate linkage
  modified_base 2: mod_base = OTHER; note = 2'-O-methyluridine with a 3'-phosphorothioate linkage
  modified_base 3: mod_base = gm
  modified_base 4: mod_base = OTHER; note = 2'-O-methyladenosine
  modified_base 5: mod_base = OTHER; note = 2'-O-methyladenosine
  modified_base 6: mod_base = gm
  modified_base 7: mod_base = OTHER; note = 2'-fluoroguanosine
  modified_base 8: mod_base = OTHER; note = 2'-O-methyladenosine
  modified_base 9: mod_base = OTHER; note = 2'-fluorocytidine
  modified_base 10: mod_base = OTHER; note = 2'-fluoroadenosine
  modified_base 11: mod_base = OTHER; note = 2'-fluorouridine
  modified_base 12: mod_base = gm
  modified_base 13: mod_base = gm
  modified_base 14: mod_base = cm
  modified_base 15: mod_base = um
  modified_base 16: mod_base = um
  modified_base 17: mod_base = OTHER; note = 2'-O-methyladenosine
  modified_base 18: mod_base = gm
  modified_base 19: mod_base = OTHER; note = 2'-O-methyladenosine with a 3'-phosphorothioate linkage
  modified_base 20: mod_base = OTHER; note = 2'-O-methyladenosine with a 3'-phosphorothioate linkage
  modified_base 21: mod_base = OTHER; note = 2'-O-methyladenosine
atgaaggacatggcttagaaa

SEQ ID NO: 631 - RNA, 23 nt, synthetic construct
  source 1..23: mol_type = other RNA
  modified_base 1: mod_base = OTHER; note = 2'-O-methyluridine with a 3'-phosphorothioate linkage
  modified_base 2: mod_base = OTHER; note = 2'-fluorouridine with a 3'-phosphorothioate linkage
  modified_base 3: mod_base = um
  modified_base 4: mod_base = cm
  modified_base 5: mod_base = um
  modified_base 6: mod_base = OTHER; note = 2'-fluoroadenosine
  modified_base 7: mod_base = OTHER; note = 2'-O-methyladenosine
  modified_base 8: mod_base = gm
  modified_base 9: mod_base = cm
  modified_base 10: mod_base = cm
  modified_base 11: mod_base = OTHER; note = 2'-O-methyladenosine
  modified_base 12: mod_base = um
  modified_base 13: mod_base = gm
  modified_base 14: mod_base = OTHER; note = 2'-fluorouridine
  modified_base 15: mod_base = cm
  modified_base 16: mod_base = OTHER; note = 2'-fluorocytidine
  modified_base 17: mod_base = um
  modified_base 18: mod_base = um
  modified_base 19: mod_base = cm
  modified_base 20: mod_base = OTHER; note = 2'-O-methyladenosine
  modified_base 21: mod_base = OTHER; note = 2'-O-methyluridine with a 3'-phosphorothioate linkage
  modified_base 22: mod_base = OTHER; note = 2'-O-methylcytidine with a 3'-phosphorothioate linkage
  modified_base 23: mod_base = OTHER; note = 2'-O-methyladenosine
tttctaagccatgtccttcatca

SEQ ID NO: 632 - RNA, 21 nt, synthetic construct
  source 1..21: mol_type = other RNA
  modified_base 1: mod_base = OTHER; note = 2'-O-methyluridine with a 3'-phosphorothioate linkage
  modified_base 2: mod_base = OTHER; note = 2'-O-methyluridine with a 3'-phosphorothioate linkage
  modified_base 3: mod_base = cm
  modified_base 4: mod_base = cm
  modified_base 5: mod_base = OTHER; note = 2'-O-methyladenosine
  modified_base 6: mod_base = OTHER; note = 2'-O-methyladenosine
  modified_base 7: mod_base = OTHER; note = 2'-fluoroadenosine
  modified_base 8: mod_base = um
  modified_base 9: mod_base = OTHER; note = 2'-fluoroguanosine
  modified_base 10: mod_base = OTHER; note = 2'-fluorocytidine
  modified_base 11: mod_base = OTHER; note = 2'-fluoroadenosine
  modified_base 12: mod_base = gm
  modified_base 13: mod_base = OTHER; note = 2'-O-methyladenosine
  modified_base 14: mod_base = OTHER; note = 2'-O-methyladenosine
  modified_base 15: mod_base = gm
  modified_base 16: mod_base = OTHER; note = 2'-O-methyladenosine
  modified_base 17: mod_base = um
  modified_base 18: mod_base = gm
  modified_base 19: mod_base = OTHER; note = 2'-O-methyluridine with a 3'-phosphorothioate linkage
  modified_base 20: mod_base = OTHER; note = 2'-O-methyladenosine with a 3'-phosphorothioate linkage
  modified_base 21: mod_base = OTHER; note = 2'-O-methyladenosine
ttccaaatgcagaagatgtaa

SEQ ID NO: 633 - RNA, 23 nt, synthetic construct
  source 1..23: mol_type = other RNA
  modified_base 1: mod_base = OTHER; note = 2'-O-methyluridine with a 3'-phosphorothioate linkage
  modified_base 2: mod_base = OTHER; note = 2'-fluorouridine with a 3'-phosphorothioate linkage
  modified_base 3: mod_base = OTHER; note = 2'-O-methyladenosine
  modified_base 4: mod_base = cm
  modified_base 5: mod_base = OTHER; note = 2'-O-methyladenosine
  modified_base 6: mod_base = OTHER; note = 2'-fluorouridine
  modified_base 7: mod_base = cm
  modified_base 8: mod_base = um
  modified_base 9: mod_base = um
  modified_base 10: mod_base = cm
  modified_base 11: mod_base = um
  modified_base 12: mod_base = gm
  modified_base 13: mod_base = cm
  modified_base 14: mod_base = OTHER; note = 2'-fluoroadenosine
  modified_base 15: mod_base = um
  modified_base 16: mod_base = OTHER; note = 2'-fluorouridine
  modified_base 17: mod_base = um
  modified_base 18: mod_base = gm
  modified_base 19: mod_base = gm
  modified_base 20: mod_base = OTHER; note = 2'-O-methyladenosine
  modified_base 21: mod_base = OTHER; note = 2'-O-methyladenosine with a 3'-phosphorothioate linkage
  modified_base 22: mod_base = OTHER; note = 2'-O-methylguanosine with a 3'-phosphorothioate linkage
  modified_base 23: mod_base = OTHER; note = 2'-O-methyladenosine
ttacatcttctgcatttggaaga

SEQ ID NO: 634 - RNA, 21 nt, synthetic construct
  source 1..21: mol_type = other RNA
  modified_base 1: mod_base = OTHER; note = 2'-O-methylguanosine with a 3'-phosphorothioate linkage
  modified_base 2: mod_base = OTHER; note = 2'-O-methyladenosine with a 3'-phosphorothioate linkage
  modified_base 3: mod_base = gm
  modified_base 4: mod_base = OTHER; note = 2'-O-methyladenosine
  modified_base 5: mod_base = um
  modified_base 6: mod_base = cm
  modified_base 7: mod_base = OTHER; note = 2'-fluoroadenosine
  modified_base 8: mod_base = OTHER; note = 2'-O-methyladenosine
  modified_base 9: mod_base = OTHER; note = 2'-fluoroguanosine
  modified_base 10: mod_base = OTHER; note = 2'-fluoroadenosine
  modified_base 11: mod_base = OTHER; note = 2'-fluoroadenosine
  modified_base 12: mod_base = um
  modified_base 13: mod_base = gm
  modified_base 14: mod_base = OTHER; note = 2'-O-methyladenosine
  modified_base 15: mod_base = cm
  modified_base 16: mod_base = OTHER; note = 2'-O-methyladenosine
  modified_base 17: mod_base = OTHER; note = 2'-O-methyladenosine
  modified_base 18: mod_base = um
  modified_base 19: mod_base = OTHER; note = 2'-O-methylguanosine with a 3'-phosphorothioate linkage
  modified_base 20: mod_base = OTHER; note = 2'-O-methyluridine with a 3'-phosphorothioate linkage
  modified_base 21: mod_base = OTHER; note = 2'-O-methyladenosine
gagatcaagaatgacaatgta

SEQ ID NO: 635 - RNA, 23 nt, synthetic construct
  source 1..23: mol_type = other RNA
  modified_base 1: mod_base = OTHER; note = 2'-O-methyluridine with a 3'-phosphorothioate linkage
  modified_base 2: mod_base = OTHER; note = 2'-fluoroadenosine with a 3'-phosphorothioate linkage
  modified_base 3: mod_base = cm
  modified_base 4: mod_base = OTHER; note = 2'-O-methyladenosine
  modified_base 5: mod_base = um
  modified_base 6: mod_base = OTHER; note = 2'-fluorouridine
  modified_base 7: mod_base = gm
  modified_base 8: mod_base = um
  modified_base 9: mod_base = cm
  modified_base 10: mod_base = OTHER; note = 2'-O-methyladenosine
  modified_base 11: mod_base = um
  modified_base 12: mod_base = um
  modified_base 13: mod_base = cm
  modified_base 14: mod_base = OTHER; note = 2'-fluorouridine
  modified_base 15: mod_base = um
  modified_base 16: mod_base = OTHER; note = 2'-fluoroguanosine
  modified_base 17: mod_base = OTHER; note = 2'-O-methyladenosine
  modified_base 18: mod_base = um
  modified_base 19: mod_base = cm
  modified_base 20: mod_base = um
  modified_base 21: mod_base = OTHER; note = 2'-O-methylcytidine with a 3'-phosphorothioate linkage
  modified_base 22: mod_base = OTHER; note = 2'-O-methyladenosine with a 3'-phosphorothioate linkage
  modified_base 23: mod_base = um
tacattgtcattcttgatctcat

SEQ ID NO: 636 - RNA, 21 nt, synthetic construct
  source 1..21: mol_type = other RNA
  modified_base 1: mod_base = OTHER; note = 2'-O-methylcytidine with a 3'-phosphorothioate linkage
  modified_base 2: mod_base = OTHER; note = 2'-O-methyladenosine with a 3'-phosphorothioate linkage
  modified_base 3: mod_base = OTHER; note = 2'-O-methyladenosine
  modified_base 4: mod_base = gm
  modified_base 5: mod_base = um
  modified_base 6: mod_base = gm
  modified_base 7: mod_base = OTHER; note = 2'-fluorocytidine
  modified_base 8: mod_base = OTHER; note = 2'-O-methyladenosine
  modified_base 9: mod_base = OTHER; note = 2'-fluoroguanosine
  modified_base 10: mod_base = OTHER; note = 2'-fluoroadenosine
  modified_base 11: mod_base = OTHER; note = 2'-fluorouridine
  modified_base 12: mod_base = gm
  modified_base 13: mod_base = um
  modified_base 14: mod_base = OTHER; note = 2'-O-methyladenosine
  modified_base 15: mod_base = OTHER; note = 2'-O-methyladenosine
  modified_base 16: mod_base = OTHER; note = 2'-O-methyladenosine
  modified_base 17: mod_base = cm
  modified_base 18: mod_base = cm
  modified_base 19: mod_base = OTHER; note = 2'-O-methyladenosine with a 3'-phosphorothioate linkage
  modified_base 20: mod_base = OTHER; note = 2'-O-methyladenosine with a 3'-phosphorothioate linkage
  modified_base 21: mod_base = OTHER; note = 2'-O-methyladenosine
caagtgcagatgtaaaccaaa

SEQ ID NO: 637 - RNA, 23 nt, synthetic construct
  source 1..23: mol_type = other RNA
  modified_base 1: mod_base = OTHER; note = 2'-O-methyluridine with a 3'-phosphorothioate linkage
  modified_base 2: mod_base = OTHER; note = 2'-fluorouridine with a 3'-phosphorothioate linkage
  modified_base 3: mod_base = um
  modified_base 4: mod_base = gm
  modified_base 5: mod_base = gm
  modified_base 6: mod_base = OTHER; note = 2'-fluorouridine
  modified_base 7: mod_base = um
  modified_base 8: mod_base = um
  modified_base 9: mod_base = OTHER; note = 2'-O-methyladenosine
  modified_base 10: mod_base = cm
  modified_base 11: mod_base = OTHER; note = 2'-O-methyladenosine
  modified_base 12: mod_base = um
  modified_base 13: mod_base = cm
  modified_base 14: mod_base = OTHER; note = 2'-fluorouridine
  modified_base 15: mod_base = gm
  modified_base 16: mod_base = OTHER; note = 2'-fluorocytidine
  modified_base 17: mod_base = OTHER; note = 2'-O-methyladenosine
  modified_base 18: mod_base = cm
  modified_base 19: mod_base = um
  modified_base 20: mod_base = um
  modified_base 21: mod_base = OTHER; note = 2'-O-methylguanosine with a 3'-phosphorothioate linkage
  modified_base 22: mod_base = OTHER; note = 2'-O-methylguanosine with a 3'-phosphorothioate linkage
  modified_base 23: mod_base = um
tttggtttacatctgcacttggt

SEQ ID NO: 638 - RNA, 21 nt, synthetic construct
  source 1..21: mol_type = other RNA
  modified_base 1: mod_base = OTHER; note = 2'-O-methyluridine with a 3'-phosphorothioate linkage
  modified_base 2: mod_base = OTHER; note = 2'-O-methyluridine with a 3'-phosphorothioate linkage
  modified_base 3: mod_base = um
  modified_base 4: mod_base = gm
  modified_base 5: mod_base = um
  modified_base 6: mod_base = um
  modified_base 7: mod_base = OTHER; note = 2'-fluorocytidine
  modified_base 8: mod_base = gm
  modified_base 9: mod_base = OTHER; note = 2'-fluoroadenosine
  modified_base 10: mod_base = OTHER; note = 2'-fluoroadenosine
  modified_base 11: mod_base = OTHER; note = 2'-fluoroadenosine
  modified_base 12: mod_base = gm
  modified_base 13: mod_base = OTHER; note = 2'-O-methyladenosine
  modified_base 14: mod_base = OTHER; note = 2'-O-methyladenosine
  modified_base 15: mod_base = um
  modified_base 16: mod_base = gm
  modified_base 17: mod_base = gm
  modified_base 18: mod_base = um
  modified_base 19: mod_base = OTHER; note = 2'-O-methylguanosine with a 3'-phosphorothioate linkage
  modified_base 20: mod_base = OTHER; note = 2'-O-methyluridine with a 3'-phosphorothioate linkage
  modified_base 21: mod_base = OTHER; note = 2'-O-methyladenosine
tttgttcgaaagaatggtgta

SEQ ID NO: 639 - RNA, 23 nt, synthetic construct
  source 1..23: mol_type = other RNA
  modified_base 1: mod_base = OTHER; note = 2'-O-methyluridine with a 3'-phosphorothioate linkage
  modified_base 2: mod_base = OTHER; note = 2'-fluoroadenosine with a 3'-phosphorothioate linkage
  modified_base 3: mod_base = cm
  modified_base 4: mod_base = OTHER; note = 2'-O-methyladenosine
  modified_base 5: mod_base = cm
  modified_base 6: mod_base = OTHER; note = 2'-fluorocytidine
  modified_base 7: mod_base = OTHER; note = 2'-O-methyladenosine
  modified_base 8: mod_base = um
  modified_base 9: mod_base = um
  modified_base 10: mod_base = cm
  modified_base 11: mod_base = um
  modified_base 12: mod_base = um
  modified_base 13: mod_base = um
  modified_base 14: mod_base = OTHER; note = 2'-fluorocytidine
  modified_base 15: mod_base = gm
  modified_base 16: mod_base = OTHER; note = 2'-fluoroadenosine
  modified_base 17: mod_base = OTHER; note = 2'-O-methyladenosine
  modified_base 18: mod_base = cm
  modified_base 19: mod_base = OTHER; note = 2'-O-methyladenosine
  modified_base 20: mod_base = OTHER; note = 2'-O-methyladenosine
  modified_base 21: mod_base = OTHER; note = 2'-O-methyladenosine with a 3'-phosphorothioate linkage
  modified_base 22: mod_base = OTHER; note = 2'-O-methylguanosine with a 3'-phosphorothioate linkage
  modified_base 23: mod_base = cm
tacaccattctttcgaacaaagc

SEQ ID NO: 640 - RNA, 21 nt, synthetic construct
  source 1..21: mol_type = other RNA
  modified_base 1: mod_base = OTHER; note = 2'-O-methylcytidine with a 3'-phosphorothioate linkage
  modified_base 2: mod_base = OTHER; note = 2'-O-methyladenosine with a 3'-phosphorothioate linkage
  modified_base 3: mod_base = gm
  modified_base 4: mod_base = OTHER; note = 2'-O-methyladenosine
  modified_base 5: mod_base = OTHER; note = 2'-O-methyladenosine
  modified_base 6: mod_base = gm
  modified_base 7: mod_base = OTHER; note = 2'-fluoroadenosine
  modified_base 8: mod_base = um
  modified_base 9: mod_base = OTHER; note = 2'-fluoroguanosine
  modified_base 10: mod_base = OTHER; note = 2'-fluorouridine
  modified_base 11: mod_base = OTHER; note = 2'-fluoroadenosine
  modified_base 12: mod_base = gm
  modified_base 13: mod_base = OTHER; note = 2'-O-methyladenosine
  modified_base 14: mod_base = um
  modified_base 15: mod_base = um
  modified_base 16: mod_base = gm
  modified_base 17: mod_base = um
  modified_base 18: mod_base = gm
  modified_base 19: mod_base = OTHER; note = 2'-O-methyluridine with a 3'-phosphorothioate linkage
  modified_base 20: mod_base = OTHER; note = 2'-O-methylguanosine with a 3'-phosphorothioate linkage
  modified_base 21: mod_base = OTHER; note = 2'-O-methyladenosine
cagaagatgtagattgtgtga

SEQ ID NO: 641 - RNA, 23 nt, synthetic construct
  source 1..23: mol_type = other RNA
  modified_base 1: mod_base = OTHER; note = 2'-O-methyluridine with a 3'-phosphorothioate linkage
  modified_base 2: mod_base = OTHER; note = 2'-fluorocytidine with a 3'-phosphorothioate linkage
  modified_base 3: mod_base = OTHER; note = 2'-O-methyladenosine
  modified_base 4: mod_base = cm
  modified_base 5: mod_base = OTHER; note = 2'-O-methyladenosine
  modified_base 6: mod_base = OTHER; note = 2'-fluorocytidine
  modified_base 7: mod_base = OTHER; note = 2'-O-methyladenosine
  modified_base 8: mod_base = OTHER; note = 2'-O-methyladenosine
  modified_base 9: mod_base = um
  modified_base 10: mod_base = cm
  modified_base 11: mod_base = um
  modified_base 12: mod_base = OTHER; note = 2'-O-methyladenosine
  modified_base 13: mod_base = cm
  modified_base 14: mod_base = OTHER; note = 2'-fluoroadenosine
  modified_base 15: mod_base = um
  modified_base 16: mod_base = OTHER; note = 2'-fluorocytidine
  modified_base 17: mod_base = um
  modified_base 18: mod_base = um
  modified_base 19: mod_base = cm
  modified_base 20: mod_base = um
  modified_base 21: mod_base = OTHER; note = 2'-O-methylguanosine with a 3'-phosphorothioate linkage
  modified_base 22: mod_base = OTHER; note = 2'-O-methylcytidine with a 3'-phosphorothioate linkage
  modified_base 23: mod_base = OTHER; note = 2'-O-methyladenosine
tcacacaatctacatcttctgca

SEQ ID NO: 642 - RNA, 21 nt, synthetic construct
  source 1..21: mol_type = other RNA
  modified_base 1: mod_base = OTHER; note = 2'-O-methyluridine with a 3'-phosphorothioate linkage
  modified_base 2: mod_base = OTHER; note = 2'-O-methylcytidine with a 3'-phosphorothioate linkage
  modified_base 3: mod_base = um
  modified_base 4: mod_base = um
  modified_base 5: mod_base = um
  modified_base 6: mod_base = gm
  modified_base 7: mod_base = OTHER; note = 2'-fluorouridine
  modified_base 8: mod_base = OTHER; note = 2'-O-methyladenosine
  modified_base 9: mod_base = OTHER; note = 2'-fluorocytidine
  modified_base 10: mod_base = OTHER; note = 2'-fluorouridine
  modified_base 11: mod_base = OTHER; note = 2'-fluorocytidine
  modified_base 12: mod_base = um
  modified_base 13: mod_base = um
  modified_base 14: mod_base = gm
  modified_base 15: mod_base = cm
  modified_base 16: mod_base = OTHER; note = 2'-O-methyladenosine
  modified_base 17: mod_base = gm
  modified_base 18: mod_base = OTHER; note = 2'-O-methyladenosine
  modified_base 19: mod_base = OTHER; note = 2'-O-methylguanosine with a 3'-phosphorothioate linkage
  modified_base 20: mod_base = OTHER; note = 2'-O-methyladenosine with a 3'-phosphorothioate linkage
  modified_base 21: mod_base = OTHER; note = 2'-O-methyladenosine
tctttgtactcttgcagagaa

SEQ ID NO: 643 - RNA, 23 nt, synthetic construct
  source 1..23: mol_type = other RNA
  modified_base 1: mod_base = OTHER; note = 2'-O-methyluridine with a 3'-phosphorothioate linkage
  modified_base 2: mod_base = OTHER; note = 2'-fluorouridine with a 3'-phosphorothioate linkage
  modified_base 3: mod_base = cm
  modified_base 4: mod_base = um
  modified_base 5: mod_base = cm
  modified_base 6: mod_base = OTHER; note = 2'-fluorouridine
  modified_base 7: mod_base = gm
  modified_base 8: mod_base = cm
  modified_base 9: mod_base = OTHER; note = 2'-O-methyladenosine
  modified_base 10: mod_base = OTHER; note = 2'-O-methyladenosine
  modified_base 11: mod_base = gm
  modified_base 12: mod_base = OTHER; note = 2'-O-methyladenosine
  modified_base 13: mod_base = gm
  modified_base 14: mod_base = OTHER; note = 2'-fluorouridine
  modified_base 15: mod_base = OTHER; note = 2'-O-methyladenosine
  modified_base 16: mod_base = OTHER; note = 2'-fluorocytidine
  modified_base 17: mod_base = OTHER; note = 2'-O-methyladenosine
  modified_base 18: mod_base = OTHER; note = 2'-O-methyladenosine
  modified_base 19: mod_base = OTHER; note = 2'-O-methyladenosine
  modified_base 20: mod_base = gm
  modified_base 21: mod_base = OTHER; note = 2'-O-methyladenosine with a 3'-phosphorothioate linkage
  modified_base 22: mod_base = OTHER; note = 2'-O-methyluridine with a 3'-phosphorothioate linkage
  modified_base 23: mod_base = um
ttctctgcaagagtacaaagatt

SEQ ID NO: 644 - RNA, 21 nt, synthetic construct
  source 1..21: mol_type = other RNA
  modified_base 1: mod_base = OTHER; note = 2'-O-methylcytidine with a 3'-phosphorothioate linkage
  modified_base 2: mod_base = OTHER; note = 2'-O-methyladenosine with a 3'-phosphorothioate linkage
  modified_base 3: mod_base = cm
  modified_base 4: mod_base = um
  modified_base 5: mod_base = gm
  modified_base 6: mod_base = um
  modified_base 7: mod_base = OTHER; note = 2'-fluoroguanosine
  modified_base 8: mod_base = OTHER; note = 2'-O-methyladenosine
  modified_base 9: mod_base = OTHER; note = 2'-fluorocytidine
  modified_base 10: mod_base = OTHER; note = 2'-fluorocytidine
  modified_base 11: mod_base = OTHER; note = 2'-fluorocytidine
  modified_base 12: mod_base = um
  modified_base 13: mod_base = um
  modified_base 14: mod_base = gm
  modified_base 15: mod_base = cm
  modified_base 16: mod_base = OTHER; note = 2'-O-methyladenosine
  modified_base 17: mod_base = cm
  modified_base 18: mod_base = cm
  modified_base 19: mod_base = OTHER; note = 2'-O-methyladenosine with a 3'-phosphorothioate linkage
  modified_base 20: mod_base = OTHER; note = 2'-O-methyladenosine with a 3'-phosphorothioate linkage
  modified_base 21: mod_base = OTHER; note = 2'-O-methyladenosine
cactgtgacccttgcaccaaa

SEQ ID NO: 645 - RNA, 23 nt, synthetic construct
  source 1..23: mol_type = other RNA
  modified_base 1: mod_base = OTHER; note = 2'-O-methyluridine with a 3'-phosphorothioate linkage
  modified_base 2: mod_base = OTHER; note = 2'-fluorouridine with a 3'-phosphorothioate linkage
  modified_base 3: mod_base = um
  modified_base 4: mod_base = gm
  modified_base 5: mod_base = gm
  modified_base 6: mod_base = OTHER; note = 2'-fluorouridine
  modified_base 7: mod_base = gm
  modified_base 8: mod_base = cm
  modified_base 9: mod_base = OTHER; note = 2'-O-methyladenosine
  modified_base 10: mod_base = OTHER; note = 2'-O-methyladenosine
  modified_base 11: mod_base = gm
  modified_base 12: mod_base = gm
  modified_base 13: mod_base = gm
  modified_base 14: mod_base = OTHER; note = 2'-fluorouridine
  modified_base 15: mod_base = cm
  modified_base 16: mod_base = OTHER; note = 2'-fluoroadenosine
  modified_base 17: mod_base = cm
  modified_base 18: mod_base = OTHER; note = 2'-O-methyladenosine
  modified_base 19: mod_base = gm
  modified_base 20: mod_base = um
  modified_base 21: mod_base = OTHER; note = 2'-O-methylguanosine with a 3'-phosphorothioate linkage
  modified_base 22: mod_base = OTHER; note = 2'-O-methyluridine with a 3'-phosphorothioate linkage
  modified_base 23: mod_base = um
tttggtgcaagggtcacagtgtt

SEQ ID NO: 646 - RNA, 21 nt, synthetic construct
  source 1..21: mol_type = other RNA
  modified_base 1: mod_base = OTHER; note = 2'-O-methyluridine with a 3'-phosphorothioate linkage
  modified_base 2: mod_base = OTHER; note = 2'-O-methylcytidine with a 3'-phosphorothioate linkage
  modified_base 3: mod_base = cm
  modified_base 4: mod_base = OTHER; note = 2'-O-methyladenosine
  modified_base 5: mod_base = OTHER; note = 2'-O-methyladenosine
  modified_base 6: mod_base = OTHER; note = 2'-O-methyladenosine
  modified_base 7: mod_base = OTHER; note = 2'-fluorouridine
  modified_base 8: mod_base = gm
  modified_base 9: mod_base = OTHER; note = 2'-fluorocytidine
  modified_base 10: mod_base = OTHER; note = 2'-fluoroadenosine
  modified_base 11: mod_base = OTHER; note = 2'-fluoroguanosine
  modified_base 12: mod_base = OTHER; note = 2'-O-methyladenosine
  modified_base 13: mod_base = OTHER; note = 2'-O-methyladenosine
  modified_base 14: mod_base = gm
  modified_base 15: mod_base = OTHER; note = 2'-O-methyladenosine
  modified_base 16: mod_base = um
  modified_base 17: mod_base = gm
  modified_base 18: mod_base = um
  modified_base 19: mod_base = OTHER; note = 2'-O-methyladenosine with a 3'-phosphorothioate linkage
  modified_base 20: mod_base = OTHER; note = 2'-O-methylguanosine with a 3'-phosphorothioate linkage
  modified_base 21: mod_base = OTHER; note = 2'-O-methyladenosine
tccaaatgcagaagatgtaga

SEQ ID NO: 647 - RNA, 23 nt, synthetic construct
  source 1..23: mol_type = other RNA
  modified_base 1: mod_base = OTHER; note = 2'-O-methyluridine with a 3'-phosphorothioate linkage
  modified_base 2: mod_base = OTHER; note = 2'-fluorocytidine with a 3'-phosphorothioate linkage
  modified_base 3: mod_base = um
  modified_base 4: mod_base = OTHER; note = 2'-O-methyladenosine
  modified_base 5: mod_base = cm
  modified_base 6: mod_base = OTHER; note = 2'-fluoroadenosine
  modified_base 7: mod_base = um
  modified_base 8: mod_base = cm
  modified_base 9: mod_base = um
  modified_base 10: mod_base = um
  modified_base 11: mod_base = cm
  modified_base 12: mod_base = um
  modified_base 13: mod_base = gm
  modified_base 14: mod_base = OTHER; note = 2'-fluorocytidine
  modified_base 15: mod_base = OTHER; note = 2'-O-methyladenosine
  modified_base 16: mod_base = OTHER; note = 2'-fluorouridine
  modified_base 17: mod_base = um
  modified_base 18: mod_base = um
  modified_base 19: mod_base = gm
  modified_base 20: mod_base = gm
  modified_base 21: mod_base = OTHER; note = 2'-O-methyladenosine with a 3'-phosphorothioate linkage
  modified_base 22: mod_base = OTHER; note = 2'-O-methyladenosine with a 3'-phosphorothioate linkage
  modified_base 23: mod_base = gm
tctacatcttctgcatttggaag

SEQ ID NO: 648 - RNA, 21 nt, synthetic construct
  source 1..21: mol_type = other RNA
  modified_base 1: mod_base = OTHER; note = 2'-O-methyladenosine with a 3'-phosphorothioate linkage
  modified_base 2: mod_base = OTHER; note = 2'-O-methyladenosine with a 3'-phosphorothioate linkage
  modified_base 3: mod_base = um
  modified_base 4: mod_base = gm
  modified_base 5: mod_base = um
  modified_base 6: mod_base = cm
  modified_base 7: mod_base = OTHER; note = 2'-fluorocytidine
  modified_base 8: mod_base = OTHER; note = 2'-O-methyladenosine
  modified_base 9: mod_base = OTHER; note = 2'-fluoroadenosine
  modified_base 10: mod_base = OTHER; note = 2'-fluoroguanosine
  modified_base 11: mod_base = OTHER; note = 2'-fluoroadenosine
  modified_base 12: mod_base = cm
  modified_base 13: mod_base = OTHER; note = 2'-O-methyladenosine
  modified_base 14: mod_base = cm
  modified_base 15: mod_base = OTHER; note = 2'-O-methyladenosine
  modified_base 16: mod_base = gm
  modified_base 17: mod_base = cm
  modified_base 18: mod_base = OTHER; note = 2'-O-methyladenosine
  modified_base 19: mod_base = OTHER; note = 2'-O-methylguanosine with a 3'-phosphorothioate linkage
  modified_base 20: mod_base = OTHER; note = 2'-O-methyladenosine with a 3'-phosphorothioate linkage
  modified_base 21: mod_base = OTHER; note = 2'-O-methyladenosine
aatgtccaagacacagcagaa

SEQ ID NO: 649 - RNA, 23 nt, synthetic construct
  source 1..23: mol_type = other RNA
  modified_base 1: mod_base = OTHER; note = 2'-O-methyluridine with a 3'-phosphorothioate linkage
  modified_base 2: mod_base = OTHER; note = 2'-fluorouridine with a 3'-phosphorothioate linkage
  modified_base 3: mod_base = cm
  modified_base 4: mod_base = um
  modified_base 5: mod_base = gm
  modified_base 6: mod_base = OTHER; note = 2'-fluorocytidine
  modified_base 7: mod_base = um
  modified_base 8: mod_base = gm
  modified_base 9: mod_base = um
  modified_base 10: mod_base = gm
  modified_base 11: mod_base = um
  modified_base 12: mod_base = cm
  modified_base 13: mod_base = um
  modified_base 14: mod_base = OTHER; note = 2'-fluorouridine
  modified_base 15: mod_base = gm
  modified_base 16: mod_base = OTHER; note = 2'-fluoroguanosine
  modified_base 17: mod_base = OTHER; note = 2'-O-methyladenosine
  modified_base 18: mod_base = cm
  modified_base 19: mod_base = OTHER; note = 2'-O-methyladenosine
  modified_base 20: mod_base = um
  modified_base 21: mod_base = OTHER; note = 2'-O-methyluridine with a 3'-phosphorothioate linkage
  modified_base 22: mod_base = OTHER; note = 2'-O-methylguanosine with a 3'-phosphorothioate linkage
  modified_base 23: mod_base = um
ttctgctgtgtcttggacattgt

SEQ ID NO: 650 - RNA, 21 nt, synthetic construct
  source 1..21: mol_type = other RNA
  modified_base 1: mod_base = OTHER; note = 2'-O-methylguanosine with a 3'-phosphorothioate linkage
  modified_base 2: mod_base = OTHER; note = 2'-O-methylcytidine with a 3'-phosphorothioate linkage
  modified_base 3: mod_base = cm
  modified_base 4: mod_base = OTHER; note = 2'-O-methyladenosine
  modified_base 5: mod_base = OTHER; note = 2'-O-methyladenosine
  modified_base 6: mod_base = gm
  modified_base 7: mod_base = OTHER; note = 2'-fluoroadenosine
  modified_base 8: mod_base = OTHER; note = 2'-O-methyladenosine
  modified_base 9: mod_base = OTHER; note = 2'-fluoroguanosine
  modified_base 10: mod_base = OTHER; note = 2'-fluoroguanosine
  modified_base 11: mod_base = OTHER; note = 2'-fluoroguanosine
  modified_base 12: mod_base = OTHER; note = 2'-O-methyladenosine
  modified_base 13: mod_base = OTHER; note = 2'-O-methyladenosine
  modified_base 14: mod_base = gm
  modified_base 15: mod_base = gm
  modified_base 16: mod_base = OTHER; note = 2'-O-methyladenosine
  modified_base 17: mod_base = gm
  modified_base 18: mod_base = um
  modified_base 19: mod_base = OTHER; note = 2'-O-methyladenosine with a 3'-phosphorothioate linkage
  modified_base 20: mod_base = OTHER; note = 2'-O-methylcytidine with a 3'-phosphorothioate linkage
  modified_base 21: mod_base = OTHER; note = 2'-O-methyladenosine
gccaagaagggaaggagtaca

SEQ ID NO: 651 - RNA, 23 nt, synthetic construct
  source 1..23: mol_type = other RNA
  modified_base 1: mod_base = OTHER; note = 2'-O-methyluridine with a 3'-phosphorothioate linkage
  modified_base 2: mod_base = OTHER; note = 2'-fluoroguanosine with a 3'-phosphorothioate linkage
  modified_base 3: mod_base = um
  modified_base 4: mod_base = OTHER; note = 2'-O-methyladenosine
  modified_base 5: mod_base = cm
  modified_base 6: mod_base = OTHER; note = 2'-fluorouridine
  modified_base 7: mod_base = cm
  modified_base 8: mod_base = cm
  modified_base 9: mod_base = um
  modified_base 10: mod_base = um
  modified_base 11: mod_base = cm
  modified_base 12: mod_base = cm
  modified_base 13: mod_base = cm
  modified_base 14: mod_base = OTHER; note = 2'-fluorouridine
  modified_base 15: mod_base = um
  modified_base 16: mod_base = OTHER; note = 2'-fluorocytidine
  modified_base 17: mod_base = um
  modified_base 18: mod_base = um
  modified_base 19: mod_base = gm
  modified_base 20: mod_base = gm
  modified_base 21: mod_base = OTHER; note = 2'-O-methylcytidine with a 3'-phosphorothioate linkage
  modified_base 22: mod_base = OTHER; note = 2'-O-methyladenosine with a 3'-phosphorothioate linkage
  modified_base 23: mod_base = gm
tgtactccttcccttcttggcag

SEQ ID NO: 652 - RNA, 21 nt, synthetic construct
  source 1..21: mol_type = other RNA
  modified_base 1: mod_base = OTHER; note = 2'-O-methylcytidine with a 3'-phosphorothioate linkage
  modified_base 2: mod_base = OTHER; note = 2'-O-methyluridine with a 3'-phosphorothioate linkage
  modified_base 3: mod_base = um
  modified_base 4: mod_base = gm
  modified_base 5: mod_base = OTHER; note = 2'-O-methyladenosine
  modified_base 6: mod_base = gm
  modified_base 7: mod_base = OTHER; note = 2'-fluorouridine
  modified_base 8: mod_base = OTHER; note = 2'-O-methyladenosine
  modified_base 9: mod_base = OTHER; note = 2'-fluoroadenosine
  modified_base 10: mod_base = OTHER; note = 2'-fluoroadenosine
  modified_base 11: mod_base = OTHER; note = 2'-fluorouridine
  modified_base 12: mod_base = OTHER; note = 2'-O-methyladenosine
  modified_base 13: mod_base = um
  modified_base 14: mod_base = OTHER; note = 2'-O-methyladenosine
  modified_base 15: mod_base = um
  modified_base 16: mod_base = cm
  modified_base 17: mod_base = OTHER; note = 2'-O-methyladenosine
  modified_base 18: mod_base = cm
  modified_base 19: mod_base = OTHER; note = 2'-O-methylcytidine with a 3'-phosphorothioate linkage
  modified_base 20: mod_base = OTHER; note = 2'-O-methyladenosine with a 3'-phosphorothioate linkage
  modified_base 21: mod_base = OTHER; note = 2'-O-methyladenosine
cttgagtaaatatatcaccaa

SEQ ID NO: 653 - RNA, 23 nt, synthetic construct
  source 1..23: mol_type = other RNA
  modified_base 1: mod_base = OTHER; note = 2'-O-methyluridine with a 3'-phosphorothioate linkage
  modified_base 2: mod_base = OTHER; note = 2'-fluorouridine with a 3'-phosphorothioate linkage
  modified_base 3: mod_base = gm
  modified_base 4: mod_base = gm
  modified_base 5: mod_base = um
  modified_base 6: mod_base = OTHER; note = 2'-fluoroguanosine
  modified_base 7: mod_base = OTHER; note = 2'-O-methyladenosine
  modified_base 8: mod_base = um
  modified_base 9: mod_base = OTHER; note = 2'-O-methyladenosine
  modified_base 10: mod_base = um
  modified_base 11: mod_base = OTHER; note = 2'-O-methyladenosine
  modified_base 12: mod_base = um
  modified_base 13: mod_base = um
  modified_base 14: mod_base = OTHER; note = 2'-fluorouridine
  modified_base 15: mod_base = OTHER; note = 2'-O-methyladenosine
  modified_base 16: mod_base = OTHER; note = 2'-fluorocytidine
  modified_base 17: mod_base = um
  modified_base 18: mod_base = cm
  modified_base 19: mod_base = OTHER; note = 2'-O-methyladenosine
  modified_base 20: mod_base = OTHER; note = 2'-O-methyladenosine
  modified_base 21: mod_base = OTHER; note = 2'-O-methylguanosine with a 3'-phosphorothioate linkage
  modified_base 22: mod_base = OTHER; note = 2'-O-methyluridine with a 3'-phosphorothioate linkage
  modified_base 23: mod_base = cm
ttggtgatatatttactcaagtc

SEQ ID NO: 654 - RNA, 21 nt, synthetic construct
  source 1..21: mol_type = other RNA
  modified_base 1: mod_base = OTHER; note = 2'-O-methyluridine with a 3'-phosphorothioate linkage
  modified_base 2: mod_base = OTHER; note = 2'-O-methyladenosine with a 3'-phosphorothioate linkage
  modified_base 3: mod_base = gm
  modified_base 4: mod_base = OTHER; note = 2'-O-methyladenosine
  modified_base 5: mod_base = um
  modified_base 6: mod_base = gm
  modified_base 7: mod_base = OTHER; note = 2'-fluoroadenosine
  modified_base 8: mod_base = gm
  modified_base 9: mod_base = OTHER; note = 2'-fluoroadenosine
  modified_base 10: mod_base = OTHER; note = 2'-fluorouridine
  modified_base 11: mod_base = OTHER; note = 2'-fluorocytidine
  modified_base 12: mod_base = OTHER; note = 2'-O-methyladenosine
  modified_base 13: mod_base = OTHER; note = 2'-O-methyladenosine
  modified_base 14: mod_base = gm
  modified_base 15: mod_base = OTHER; note = 2'-O-methyladenosine
  modified_base 16: mod_base = OTHER; note = 2'-O-methyladenosine
  modified_base 17: mod_base = um
  modified_base 18: mod_base = gm
  modified_base 19: mod_base = OTHER; note = 2'-O-methyladenosine with a 3'-phosphorothioate linkage
  modified_base 20: mod_base = OTHER; note = 2'-O-methylcytidine with a 3'-phosphorothioate linkage
  modified_base 21: mod_base = OTHER; note = 2'-O-methyladenosine
tagatgagatcaagaatgaca

SEQ ID NO: 655 - RNA, 23 nt, synthetic construct
  source 1..23: mol_type = other RNA
  modified_base 1: mod_base = OTHER; note = 2'-O-methyluridine with a 3'-phosphorothioate linkage
  modified_base 2: mod_base = OTHER; note = 2'-fluoroguanosine with a 3'-phosphorothioate linkage
  modified_base 3: mod_base = um
  modified_base 4: mod_base = cm
  modified_base 5: mod_base = OTHER; note = 2'-O-methyladenosine
  modified_base 6: mod_base = OTHER; note = 2'-fluorouridine
  modified_base 7: mod_base = um
  modified_base 8: mod_base = cm
  modified_base 9: mod_base = um
  modified_base 10: mod_base = um
  modified_base 11: mod_base = gm
  modified_base 12: mod_base = OTHER; note = 2'-O-methyladenosine
  modified_base 13: mod_base = um
  modified_base 14: mod_base = OTHER; note = 2'-fluorocytidine
  modified_base 15: mod_base = um
  modified_base 16: mod_base = OTHER; note = 2'-fluorocytidine
  modified_base 17: mod_base = OTHER; note = 2'-O-methyladenosine
  modified_base 18: mod_base = um
  modified_base 19: mod_base = cm
  modified_base 20: mod_base = um
  modified_base 21: mod_base = OTHER; note = 2'-O-methyladenosine with a 3'-phosphorothioate linkage
  modified_base 22: mod_base = OTHER; note = 2'-O-methyluridine with a 3'-phosphorothioate linkage
  modified_base 23: mod_base = um
tgtcattcttgatctcatctatt

SEQ ID NO: 656 - RNA, 21 nt, synthetic construct
  source 1..21: mol_type = other RNA
  modified_base 1: mod_base = OTHER; note = 2'-O-methyluridine with a 3'-phosphorothioate linkage
  modified_base 2: mod_base = OTHER; note = 2'-O-methyluridine with a 3'-phosphorothioate linkage
  modified_base 3: mod_base = gm
  modified_base 4: mod_base = OTHER; note = 2'-O-methyladenosine
  modified_base 5: mod_base = cm
  modified_base 6: mod_base = um
  modified_base 7: mod_base = OTHER; note = 2'-fluorouridine
  modified_base 8: mod_base = gm
  modified_base 9: mod_base = OTHER; note = 2'-fluoroadenosine
  modified_base 10: mod_base = OTHER; note = 2'-fluoroguanosine
  modified_base 11: mod_base = OTHER; note = 2'-fluorouridine
  modified_base 12: mod_base = OTHER; note = 2'-O-methyladenosine
  modified_base 13: mod_base = OTHER; note = 2'-O-methyladenosine
  modified_base 14: mod_base = OTHER; note = 2'-O-methyladenosine
  modified_base 15: mod_base = um
  modified_base 16: mod_base = OTHER; note = 2'-O-methyladenosine
  modified_base 17: mod_base = um
  modified_base 18: mod_base = OTHER; note = 2'-O-methyladenosine
  modified_base 19: mod_base = OTHER; note = 2'-O-methyluridine with a 3'-phosphorothioate linkage
  modified_base 20: mod_base = OTHER; note = 2'-O-methylcytidine with a 3'-phosphorothioate linkage
  modified_base 21: mod_base = OTHER; note = 2'-O-methyladenosine
ttgacttgagtaaatatatca

SEQ ID NO: 657 - RNA, 23 nt, synthetic construct
  source 1..23: mol_type = other RNA
  modified_base 1: mod_base = OTHER; note = 2'-O-methyluridine with a 3'-phosphorothioate linkage
  modified_base 2: mod_base = OTHER; note = 2'-fluoroguanosine with a 3'-phosphorothioate linkage
  modified_base 3: mod_base = OTHER; note = 2'-O-methyladenosine
  modified_base 4: mod_base = um
  modified_base 5: mod_base = OTHER; note = 2'-O-methyladenosine
  modified_base 6: mod_base = OTHER; note = 2'-fluorouridine
  modified_base 7: mod_base = OTHER; note = 2'-O-methyladenosine
  modified_base 8: mod_base = um
  modified_base 9: mod_base = um
  modified_base 10: mod_base = um
  modified_base 11: mod_base = OTHER; note = 2'-O-methyladenosine
  modified_base 12: mod_base = cm
  modified_base 13: mod_base = um
  modified_base 14: mod_base = OTHER; note = 2'-fluorocytidine
  modified_base 15: mod_base = OTHER; note = 2'-O-methyladenosine
  modified_base 16: mod_base = OTHER; note = 2'-fluoroadenosine
  modified_base 17: mod_base = gm
  modified_base 18: mod_base = um
  modified_base 19: mod_base = cm
  modified_base 20: mod_base = OTHER; note = 2'-O-methyladenosine
  modified_base 21: mod_base = OTHER; note = 2'-O-methyladenosine with a 3'-phosphorothioate linkage
  modified_base 22: mod_base = OTHER; note = 2'-O-methylcytidine with a 3'-phosphorothioate linkage
  modified_base 23: mod_base = OTHER; note = 2'-O-methyladenosine
tgatatatttactcaagtcaaca

SEQ ID NO: 658 - RNA, 21 nt, synthetic construct
  source 1..21: mol_type = other RNA
  modified_base 1: mod_base = OTHER; note = 2'-O-methyladenosine with a 3'-phosphorothioate linkage
  modified_base 2: mod_base = OTHER; note = 2'-O-methylguanosine with a 3'-phosphorothioate linkage
  modified_base 3: mod_base = um
  modified_base 4: mod_base = OTHER; note = 2'-O-methyladenosine
  modified_base 5: mod_base = OTHER; note = 2'-O-methyladenosine
  modified_base 6: mod_base = OTHER; note = 2'-O-methyladenosine
  modified_base 7: mod_base = OTHER; note = 2'-fluorouridine
  modified_base 8: mod_base = OTHER; note = 2'-O-methyladenosine
  modified_base 9: mod_base = OTHER; note = 2'-fluorouridine
  modified_base 10: mod_base = OTHER; note = 2'-fluoroadenosine
  modified_base 11: mod_base = OTHER; note = 2'-fluorouridine
  modified_base 12: mod_base = cm
  modified_base 13: mod_base = OTHER; note = 2'-O-methyladenosine
  modified_base 14: mod_base = cm
  modified_base 15: mod_base = cm
  modified_base 16: mod_base = OTHER; note = 2'-O-methyladenosine
  modified_base 17: mod_base = cm
  modified_base 18: mod_base = um
  modified_base 19: mod_base = OTHER; note = 2'-O-methyladenosine with a 3'-phosphorothioate linkage
  modified_base 20: mod_base = OTHER; note = 2'-O-methyluridine with a 3'-phosphorothioate linkage
  modified_base 21: mod_base = OTHER; note = 2'-O-methyladenosine
agtaaatatatcaccactata

SEQ ID NO: 659 - RNA, 23 nt, synthetic construct
  source 1..23: mol_type = other RNA
  modified_base 1: mod_base = OTHER; note = 2'-O-methyluridine with a 3'-phosphorothioate linkage
  modified_base 2: mod_base = OTHER; note = 2'-fluoroadenosine with a 3'-phosphorothioate linkage
  modified_base 3: mod_base = um
  modified_base 4: mod_base = OTHER; note = 2'-O-methyladenosine
  modified_base 5: mod_base = gm
  modified_base 6: mod_base = OTHER; note = 2'-fluorouridine
  modified_base 7: mod_base = gm
  modified_base 8: mod_base = gm
  modified_base 9: mod_base = um
  modified_base 10: mod_base = gm
  modified_base 11: mod_base = OTHER; note = 2'-O-methyladenosine
  modified_base 12: mod_base = um
  modified_base 13: mod_base = OTHER; note = 2'-O-methyladenosine
  modified_base 14: mod_base = OTHER; note = 2'-fluorouridine
  modified_base 15: mod_base = OTHER; note = 2'-O-methyladenosine
  modified_base 16: mod_base = OTHER; note = 2'-fluorouridine
  modified_base 17: mod_base = um
  modified_base 18: mod_base = um
  modified_base 19: mod_base = OTHER; note = 2'-O-methyladenosine
  modified_base 20: mod_base = cm
  modified_base 21: mod_base = OTHER; note = 2'-O-methyluridine with a 3'-phosphorothioate linkage
  modified_base 22: mod_base = OTHER; note = 2'-O-methylcytidine with a 3'-phosphorothioate linkage
  modified_base 23: mod_base = OTHER; note = 2'-O-methyladenosine
tatagtggtgatatatttactca

SEQ ID NO: 660 - RNA, 21 nt, synthetic construct
  source 1..21: mol_type = other RNA
  modified_base 1: mod_base = OTHER; note = 2'-O-methyluridine with a 3'-phosphorothioate linkage
  modified_base 2: mod_base = OTHER; note = 2'-O-methyladenosine with a 3'-phosphorothioate linkage
  modified_base 3: mod_base = cm
  modified_base 4: mod_base = cm
  modified_base 5: mod_base = OTHER; note = 2'-O-methyladenosine
  modified_base 6: mod_base = OTHER; note = 2'-O-methyladenosine
  modified_base 7: mod_base = OTHER; note = 2'-fluoroguanosine
  modified_base 8: mod_base = um
  modified_base 9: mod_base = OTHER; note = 2'-fluoroguanosine
  modified_base 10: mod_base = OTHER; note = 2'-fluorocytidine
  modified_base 11: mod_base = OTHER; note = 2'-fluoroadenosine
  modified_base 12: mod_base = gm
  modified_base 13: mod_base = OTHER; note = 2'-O-methyladenosine
  modified_base 14: mod_base = um
  modified_base 15: mod_base = gm
  modified_base 16: mod_base = um
  modified_base 17: mod_base = OTHER; note = 2'-O-methyladenosine
  modified_base 18: mod_base = OTHER; note = 2'-O-methyladenosine
  modified_base 19: mod_base = OTHER; note = 2'-O-methyladenosine with a 3'-phosphorothioate linkage
  modified_base 20: mod_base = OTHER; note = 2'-O-methylcytidine with a 3'-phosphorothioate linkage
  modified_base 21: mod_base = OTHER; note = 2'-O-methyladenosine
taccaagtgcagatgtaaaca

SEQ ID NO: 661 - RNA, 23 nt, synthetic construct
  source 1..23: mol_type = other RNA
  modified_base 1: mod_base = OTHER; note = 2'-O-methyluridine with a 3'-phosphorothioate linkage
  modified_base 2: mod_base = OTHER; note = 2'-fluoroguanosine with a 3'-phosphorothioate linkage
  modified_base 3: mod_base = um
  modified_base 4: mod_base = um
  modified_base 5: mod_base = um
  modified_base 6: mod_base = OTHER; note = 2'-fluoroadenosine
  modified_base 7: mod_base = cm
  modified_base 8: mod_base = OTHER; note = 2'-O-methyladenosine
  modified_base 9: mod_base = um
  modified_base 10: mod_base = cm
  modified_base 11: mod_base = um
  modified_base 12: mod_base = gm
  modified_base 13: mod_base = cm
  modified_base 14: mod_base = OTHER; note = 2'-fluoroadenosine
  modified_base 15: mod_base = cm
  modified_base 16: mod_base = OTHER; note = 2'-fluorouridine
  modified_base 17: mod_base = um
  modified_base 18: mod_base = gm
  modified_base 19: mod_base = gm
  modified_base 20: mod_base = um
  modified_base 21: mod_base = OTHER; note = 2'-O-methyladenosine with a 3'-phosphorothioate linkage
  modified_base 22: mod_base = OTHER; note = 2'-O-methyluridine with a 3'-phosphorothioate linkage
  modified_base 23: mod_base = um
tgtttacatctgcacttggtatt

SEQ ID NO: 662 - RNA, 21 nt, synthetic construct
  source 1..21: mol_type = other RNA
  modified_base 1: mod_base = OTHER; note = 2'-O-methylcytidine with a 3'-phosphorothioate linkage
  modified_base 2: mod_base = OTHER; note = 2'-O-methyluridine with a 3'-phosphorothioate linkage
  modified_base 3: mod_base = gm
  modified_base 4: mod_base = um
  modified_base 5: mod_base = OTHER; note = 2'-O-methyladenosine
  modified_base 6: mod_base = um
  modified_base 7: mod_base = OTHER; note = 2'-fluoroguanosine
  modified_base 8: mod_base = um
  modified_base 9: mod_base = OTHER; note = 2'-fluoroguanosine
  modified_base 10: mod_base = OTHER; note = 2'-fluoroadenosine
  modified_base 11: mod_base = OTHER; note = 2'-fluoroadenosine
  modified_base 12: mod_base = cm
  modified_base 13: mod_base = OTHER; note = 2'-O-methyladenosine
  modified_base 14: mod_base = cm
  modified_base 15: mod_base = um
  modified_base 16: mod_base = gm
  modified_base 17: mod_base = um
  modified_base 18: mod_base = gm
  modified_base 19: mod_base = OTHER; note = 2'-O-methyladenosine with a 3'-phosphorothioate linkage
  modified_base 20: mod_base = OTHER; note = 2'-O-methylcytidine with a 3'-phosphorothioate linkage
  modified_base 21: mod_base = OTHER; note = 2'-O-methyladenosine
ctgtatgtgaacactgtgaca

SEQ ID NO: 663 - RNA, 23 nt, synthetic construct
  source 1..23: mol_type = other RNA
  modified_base 1: mod_base = OTHER; note = 2'-O-methyluridine with a 3'-phosphorothioate linkage
  modified_base 2: mod_base = OTHER; note = 2'-fluoroguanosine with a 3'-phosphorothioate linkage
  modified_base 3: mod_base = um
  modified_base 4: mod_base = cm
  modified_base 5: mod_base = OTHER; note = 2'-O-methyladenosine
  modified_base 6: mod_base = OTHER; note = 2'-fluorocytidine
  modified_base 7: mod_base = OTHER; note = 2'-O-methyladenosine
  modified_base 8: mod_base = gm
  modified_base 9: mod_base = um
  modified_base 10: mod_base = gm
  modified_base 11: mod_base = um
  modified_base 12: mod_base = um
  modified_base 13: mod_base = cm
  modified_base 14: mod_base = OTHER; note = 2'-fluoroadenosine
  modified_base 15: mod_base = cm
  modified_base 16: mod_base = OTHER; note = 2'-fluoroadenosine
  modified_base 17: mod_base = um
  modified_base 18: mod_base = OTHER; note = 2'-O-methyladenosine
  modified_base 19: mod_base = cm
  modified_base 20: mod_base = OTHER; note = 2'-O-methyladenosine
  modified_base 21: mod_base = OTHER; note = 2'-O-methylguanosine with a 3'-phosphorothioate linkage
  modified_base 22: mod_base = OTHER; note = 2'-O-methyluridine with a 3'-phosphorothioate linkage
  modified_base 23: mod_base = OTHER; note = 2'-O-methyladenosine
tgtcacagtgttcacatacagta

SEQ ID NO: 664 - RNA, 21 nt, synthetic construct
  source 1..21: mol_type = other RNA
  modified_base 1: mod_base = OTHER; note = 2'-O-methylguanosine with a 3'-phosphorothioate linkage
  modified_base 2: mod_base = OTHER; note = 2'-O-methyladenosine with a 3'-phosphorothioate linkage
  modified_base 3: mod_base = um
  modified_base 4: mod_base = cm
  modified_base 5: mod_base = OTHER; note = 2'-O-methyladenosine
  modified_base 6: mod_base = OTHER; note = 2'-O-methyladenosine
  modified_base 7: mod_base = OTHER; note = 2'-fluoroguanosine
  modified_base 8: mod_base = OTHER; note = 2'-O-methyladenosine
  modified_base 9: mod_base = OTHER; note = 2'-fluoroadenosine
  modified_base 10: mod_base = OTHER; note = 2'-fluorouridine
  modified_base 11: mod_base = OTHER; note = 2'-fluoroguanosine
  modified_base 12: mod_base = OTHER; note = 2'-O-methyladenosine
  modified_base 13: mod_base = cm
  modified_base 14: mod_base = OTHER; note = 2'-O-methyladenosine
  modified_base 15: mod_base = OTHER; note = 2'-O-methyladenosine
  modified_base 16: mod_base = um
  modified_base 17: mod_base = gm
  modified_base 18: mod_base = um
  modified_base 19: mod_base = OTHER; note = 2'-O-methylcytidine with a 3'-phosphorothioate linkage
  modified_base 20: mod_base = OTHER; note = 2'-O-methylcytidine with a 3'-phosphorothioate linkage
  modified_base 21: mod_base = OTHER; note = 2'-O-methyladenosine
gatcaagaatgacaatgtcca

SEQ ID NO: 665 - RNA, 23 nt, synthetic construct
  source 1..23: mol_type = other RNA
  modified_base 1: mod_base = OTHER; note = 2'-O-methyluridine with a 3'-phosphorothioate linkage
  modified_base 2: mod_base = OTHER; note = 2'-fluoroguanosine with a 3'-phosphorothioate linkage
  modified_base 3: mod_base = gm
  modified_base 4: mod_base = OTHER; note = 2'-O-methyladenosine
  modified_base 5: mod_base = cm
  modified_base 6: mod_base = OTHER; note = 2'-fluoroadenosine
  modified_base 7: mod_base = um
  modified_base 8: mod_base = um
  modified_base 9: mod_base = gm
  modified_base 10: mod_base = um
  modified_base 11: mod_base = cm
  modified_base 12: mod_base = OTHER; note = 2'-O-methyladenosine
  modified_base 13: mod_base = um
  modified_base 14: mod_base = OTHER; note = 2'-fluorouridine
  modified_base 15: mod_base = cm
  modified_base 16: mod_base = OTHER; note = 2'-fluorouridine
  modified_base 17: mod_base = um
  modified_base 18: mod_base = gm
  modified_base 19: mod_base = OTHER; note = 2'-O-methyladenosine
  modified_base 20: mod_base = um
  modified_base 21: mod_base = OTHER; note = 2'-O-methylcytidine with a 3'-phosphorothioate linkage
  modified_base 22: mod_base = OTHER; note = 2'-O-methyluridine with a 3'-phosphorothioate linkage
  modified_base 23: mod_base = cm
tggacattgtcattcttgatctc

SEQ ID NO: 666 - RNA, 21 nt, synthetic construct
  source 1..21: mol_type = other RNA
  modified_base 1: mod_base = OTHER; note = 2'-O-methyladenosine with a 3'-phosphorothioate linkage
  modified_base 2: mod_base = OTHER; note = 2'-O-methyluridine with a 3'-phosphorothioate linkage
  modified_base 3: mod_base = gm
  modified_base 4: mod_base = OTHER; note = 2'-O-methyladenosine
  modified_base 5: mod_base = cm
  modified_base 6: mod_base = OTHER; note = 2'-O-methyladenosine
  modified_base 7: mod_base = OTHER; note = 2'-fluorocytidine
  modified_base 8: mod_base = um
  modified_base 9: mod_base = OTHER; note = 2'-fluoroadenosine
  modified_base 10: mod_base = OTHER; note = 2'-fluoroadenosine
  modified_base 11: mod_base = OTHER; note = 2'-fluoroguanosine
  modified_base 12: mod_base = um
  modified_base 13: mod_base = cm
  modified_base 14: mod_base = OTHER; note = 2'-O-methyladenosine
  modified_base 15: mod_base = OTHER; note = 2'-O-methyladenosine
  modified_base 16: mod_base = gm
  modified_base 17: mod_base = um
  modified_base 18: mod_base = um
  modified_base 19: mod_base = OTHER; note = 2'-O-methyladenosine with a 3'-phosphorothioate linkage
  modified_base 20: mod_base = OTHER; note = 2'-O-methyladenosine with a 3'-phosphorothioate linkage
  modified_base 21: mod_base = OTHER; note = 2'-O-methyladenosine
atgacactaagtcaagttaaa

SEQ ID NO: 667 - RNA, 23 nt, synthetic construct
  source 1..23: mol_type = other RNA
  modified_base 1: mod_base = OTHER; note = 2'-O-methyluridine with a 3'-phosphorothioate linkage
  modified_base 2: mod_base = OTHER; note = 2'-fluorouridine with a 3'-phosphorothioate linkage
  modified_base 3: mod_base = um
  modified_base 4: mod_base = OTHER; note = 2'-O-methyladenosine
  modified_base 5: mod_base = OTHER; note = 2'-O-methyladenosine
  modified_base 6: mod_base = OTHER; note = 2'-fluorocytidine
  modified_base 7: mod_base = um
  modified_base 8: mod_base = um
  modified_base 9: mod_base = gm
  modified_base 10: mod_base = OTHER; note = 2'-O-methyladenosine
  modified_base 11: mod_base = cm
  modified_base 12: mod_base = um
  modified_base 13: mod_base = um
  modified_base 14: mod_base = OTHER; note = 2'-fluoroadenosine
  modified_base 15: mod_base = gm
  modified_base 16: mod_base = OTHER; note = 2'-fluorouridine
  modified_base 17: mod_base = gm
  modified_base 18: mod_base = um
  modified_base 19: mod_base = cm
  modified_base 20: mod_base = OTHER; note = 2'-O-methyladenosine
  modified_base 21: mod_base = OTHER; note = 2'-O-methyluridine with a 3'-phosphorothioate linkage
  modified_base 22: mod_base = OTHER; note = 2'-O-methylguanosine with a 3'-phosphorothioate linkage
  modified_base 23: mod_base = OTHER; note = 2'-O-methyladenosine
tttaacttgacttagtgtcatga

SEQ ID NO: 668 - RNA, 21 nt, synthetic construct
  source 1..21: mol_type = other RNA
  modified_base 1: mod_base = OTHER; note = 2'-O-methyladenosine with a 3'-phosphorothioate linkage
  modified_base 2: mod_base = OTHER; note = 2'-O-methyladenosine with a 3'-phosphorothioate linkage
  modified_base 3: mod_base = OTHER; note = 2'-O-methyladenosine
  modified_base 4: mod_base = um
  modified_base 5: mod_base = OTHER; note = 2'-O-methyladenosine
  modified_base 6: mod_base = gm
  modified_base 7: mod_base = OTHER; note = 2'-fluoroadenosine
  modified_base 8: mod_base = um
  modified_base 9: mod_base = OTHER; note = 2'-fluoroguanosine
  modified_base 10: mod_base = OTHER; note = 2'-fluoroadenosine
  modified_base 11: mod_base = OTHER; note = 2'-fluoroguanosine
  modified_base 12: mod_base = OTHER; note = 2'-O-methyladenosine
  modified_base 13: mod_base = um
  modified_base 14: mod_base = cm
  modified_base 15: mod_base = OTHER; note = 2'-O-methyladenosine
  modified_base 16: mod_base = OTHER; note = 2'-O-methyladenosine
  modified_base 17: mod_base = gm
  modified_base 18: mod_base = OTHER; note = 2'-O-methyladenosine
  modified_base 19: mod_base = OTHER; note = 2'-O-methyladenosine with a 3'-phosphorothioate linkage
  modified_base 20: mod_base = OTHER; note = 2'-O-methyluridine with a 3'-phosphorothioate linkage
  modified_base 21: mod_base = OTHER; note = 2'-O-methyladenosine
aaatagatgagatcaagaata

SEQ ID NO: 669 - RNA, 23 nt, synthetic construct
  source 1..23: mol_type = other RNA
  modified_base 1: mod_base = OTHER; note = 2'-O-methyluridine with a 3'-phosphorothioate linkage
  modified_base 2: mod_base = OTHER; note = 2'-fluoroadenosine with a 3'-phosphorothioate linkage
  modified_base 3: mod_base = um
  modified_base 4: mod_base = um
  modified_base 5: mod_base = cm
  modified_base 6: mod_base = OTHER; note = 2'-fluorouridine
  modified_base 7: mod_base = um
  modified_base 8: mod_base = gm
  modified_base 9: mod_base = OTHER; note = 2'-O-methyladenosine
  modified_base 10: mod_base = um
  modified_base 11: mod_base = cm
  modified_base 12: mod_base = um
  modified_base 13: mod_base = cm
  modified_base 14: mod_base = OTHER; note = 2'-fluoroadenosine
  modified_base 15: mod_base = um
  modified_base 16: mod_base = OTHER; note = 2'-fluorocytidine
  modified_base 17: mod_base = um
  modified_base 18: mod_base = OTHER; note = 2'-O-methyladenosine
  modified_base 19: mod_base = um
  modified_base 20: mod_base = um
  modified_base 21: mod_base = OTHER; note = 2'-O-methyluridine with a 3'-phosphorothioate linkage
  modified_base 22: mod_base = OTHER; note = 2'-O-methyluridine with a 3'-phosphorothioate linkage
  modified_base 23: mod_base = gm
tattcttgatctcatctattttg

SEQ ID NO: 670 - RNA, 21 nt, synthetic construct
  source 1..21: mol_type = other RNA
  modified_base 1: mod_base = OTHER; note = 2'-O-methylguanosine with a 3'-phosphorothioate linkage
  modified_base 2: mod_base = OTHER; note = 2'-O-methyluridine with a 3'-phosphorothioate linkage
  modified_base 3: mod_base = OTHER; note = 2'-O-methyladenosine
  modified_base 4: mod_base = um
  modified_base 5: mod_base = gm
  modified_base 6: mod_base = um
  modified_base 7: mod_base = OTHER; note = 2'-fluoroguanosine
  modified_base 8: mod_base = OTHER; note = 2'-O-methyladenosine
  modified_base 9: mod_base = OTHER; note = 2'-fluoroadenosine
  modified_base 10: mod_base = OTHER; note = 2'-fluorocytidine
  modified_base 11: mod_base = OTHER; note = 2'-fluoroadenosine
  modified_base 12: mod_base = cm
  modified_base 13: mod_base = um
  modified_base 14: mod_base = gm
  modified_base 15: mod_base = um
  modified_base 16: mod_base = gm
  modified_base 17: mod_base = OTHER; note = 2'-O-methyladenosine
  modified_base 18: mod_base = cm
  modified_base 19: mod_base = OTHER; note = 2'-O-methylcytidine with a 3'-phosphorothioate linkage
  modified_base 20: mod_base = OTHER; note = 2'-O-methylcytidine with a 3'-phosphorothioate linkage
  modified_base 21: mod_base = OTHER; note = 2'-O-methyladenosine
gtatgtgaacactgtgaccca

SEQ ID NO: 671 - RNA, 23 nt, synthetic construct
  source 1..23: mol_type = other RNA
  modified_base 1: mod_base = OTHER; note = 2'-O-methyluridine with a 3'-phosphorothioate linkage
  modified_base 2: mod_base = OTHER; note = 2'-fluoroguanosine with a 3'-phosphorothioate linkage
  modified_base 3: mod_base = gm
  modified_base 4: mod_base = gm
  modified_base 5: mod_base = um
  modified_base 6: mod_base = OTHER; note = 2'-fluorocytidine
  modified_base 7: mod_base = OTHER; note = 2'-O-methyladenosine
  modified_base 8: mod_base = cm
  modified_base 9: mod_base = OTHER; note = 2'-O-methyladenosine
  modified_base 10: mod_base = gm
  modified_base 11: mod_base = um
  modified_base 12: mod_base = gm
  modified_base 13: mod_base = um
  modified_base 14: mod_base = OTHER; note = 2'-fluorouridine
  modified_base 15: mod_base = cm
  modified_base 16: mod_base = OTHER; note = 2'-fluoroadenosine
  modified_base 17: mod_base = cm
  modified_base 18: mod_base = OTHER; note = 2'-O-methyladenosine
  modified_base 19: mod_base = um
  modified_base 20: mod_base = OTHER; note = 2'-O-methyladenosine
  modified_base 21: mod_base = OTHER; note = 2'-O-methylcytidine with a 3'-phosphorothioate linkage
  modified_base 22: mod_base = OTHER; note = 2'-O-methyladenosine with a 3'-phosphorothioate linkage
  modified_base 23: mod_base = gm
tgggtcacagtgttcacatacag

SEQ ID NO: 672 - RNA, 21 nt, synthetic construct
  source 1..21: mol_type = other RNA
  modified_base 1: mod_base = OTHER; note = 2'-O-methyladenosine with a 3'-phosphorothioate linkage
  modified_base 2: mod_base = OTHER; note = 2'-O-methyladenosine with a 3'-phosphorothioate linkage
  modified_base 3: mod_base = um
  modified_base 4: mod_base = OTHER; note = 2'-O-methyladenosine
  modified_base 5: mod_base = cm
  modified_base 6: mod_base = cm
  modified_base 7: mod_base = OTHER; note = 2'-fluoroadenosine
  modified_base 8: mod_base = OTHER; note = 2'-O-methyladenosine
  modified_base 9: mod_base = OTHER; note = 2'-fluoroguanosine
  modified_base 10: mod_base = OTHER; note = 2'-fluorouridine
  modified_base 11: mod_base = OTHER; note = 2'-fluoroguanosine
  modified_base 12: mod_base = cm
  modified_base 13: mod_base = OTHER; note = 2'-O-methyladenosine
  modified_base 14: mod_base = gm
  modified_base 15: mod_base = OTHER; note = 2'-O-methyladenosine
  modified_base 16: mod_base = um
  modified_base 17: mod_base = gm
  modified_base 18: mod_base = um
  modified_base 19: mod_base = OTHER; note = 2'-O-methyladenosine with a 3'-phosphorothioate linkage
  modified_base 20: mod_base = OTHER; note = 2'-O-methyladenosine with a 3'-phosphorothioate linkage
  modified_base 21: mod_base = OTHER; note = 2'-O-methyladenosine
aataccaagtgcagatgtaaa

SEQ ID NO: 673 - RNA, 23 nt, synthetic construct
  source 1..23: mol_type = other RNA
  modified_base 1: mod_base = OTHER; note = 2'-O-methyluridine with a 3'-phosphorothioate linkage
  modified_base 2: mod_base = OTHER; note = 2'-fluorouridine with a 3'-phosphorothioate linkage
  modified_base 3: mod_base = um
  modified_base 4: mod_base = OTHER; note = 2'-O-methyladenosine
  modified_base 5: mod_base = cm
  modified_base 6: mod_base = OTHER; note = 2'-fluoroadenosine
  modified_base 7: mod_base = um
  modified_base 8: mod_base = cm
  modified_base 9: mod_base = um
  modified_base 10: mod_base = gm
  modified_base 11: mod_base = cm
  modified_base 12: mod_base = OTHER; note = 2'-O-methyladenosine
  modified_base 13: mod_base = cm
  modified_base 14: mod_base = OTHER; note = 2'-fluorouridine
  modified_base 15: mod_base = um
  modified_base 16: mod_base = OTHER; note = 2'-fluoroguanosine
  modified_base 17: mod_base = gm
  modified_base 18: mod_base = um
  modified_base 19: mod_base = OTHER; note = 2'-O-methyladenosine
  modified_base 20: mod_base = um
  modified_base 21: mod_base = OTHER; note = 2'-O-methyluridine with a 3'-phosphorothioate linkage
  modified_base 22: mod_base = OTHER; note = 2'-O-methylcytidine with a 3'-phosphorothioate linkage
  modified_base 23: mod_base = um
tttacatctgcacttggtattct

SEQ ID NO: 674 - RNA, 21 nt, synthetic construct
  source 1..21: mol_type = other RNA
  modified_base 1: mod_base = OTHER; note = 2'-O-methyluridine with a 3'-phosphorothioate linkage
  modified_base 2: mod_base = OTHER; note = 2'-O-methylguanosine with a 3'-phosphorothioate linkage
  modified_base 3: mod_base = OTHER; note = 2'-O-methyladenosine
  modified_base 4: mod_base = gm
  modified_base 5: mod_base = OTHER; note = 2'-O-methyladenosine
  modified_base 6: mod_base = um
  modified_base 7: mod_base = OTHER; note = 2'-fluorocytidine
  modified_base 8: mod_base = OTHER; note = 2'-O-methyladenosine
  modified_base 9: mod_base = OTHER; note = 2'-fluoroadenosine
  modified_base 10: mod_base = OTHER; note = 2'-fluoroguanosine
  modified_base 11: mod_base = OTHER; note = 2'-fluoroadenosine
  modified_base 12: mod_base = OTHER; note = 2'-O-methyladenosine
  modified_base 13: mod_base = um
  modified_base 14: mod_base = gm
  modified_base 15: mod_base = OTHER; note = 2'-O-methyladenosine
  modified_base 16: mod_base = cm
  modified_base 17: mod_base = OTHER; note = 2'-O-methyladenosine
  modified_base 18: mod_base = OTHER; note = 2'-O-methyladenosine
  modified_base 19: mod_base = OTHER; note = 2'-O-methyluridine with a 3'-phosphorothioate linkage
  modified_base 20: mod_base = OTHER; note = 2'-O-methylguanosine with a 3'-phosphorothioate linkage
  modified_base 21: mod_base = OTHER; note = 2'-O-methyladenosine
tgagatcaagaatgacaatga

SEQ ID NO: 675 - RNA, 23 nt, synthetic construct
  source 1..23: mol_type = other RNA
  modified_base 1: mod_base = OTHER; note = 2'-O-methyluridine with a 3'-phosphorothioate linkage
  modified_base 2: mod_base = OTHER; note = 2'-fluorocytidine with a 3'-phosphorothioate linkage
  modified_base 3: mod_base = OTHER; note = 2'-O-methyladenosine
  modified_base 4: mod_base = um
  modified_base 5: mod_base = um
  modified_base 6: mod_base = OTHER; note = 2'-fluoroguanosine
  modified_base 7: mod_base = um
  modified_base 8: mod_base = cm
  modified_base 9: mod_base = OTHER; note = 2'-O-methyladenosine
  modified_base 10: mod_base = um
  modified_base 11: mod_base = um
  modified_base 12: mod_base = cm
  modified_base 13: mod_base = um
  modified_base 14: mod_base = OTHER; note = 2'-fluorouridine
  modified_base 15: mod_base = gm
  modified_base 16: mod_base = OTHER; note = 2'-fluoroadenosine
  modified_base 17: mod_base = um
  modified_base 18: mod_base = cm
  modified_base 19: mod_base = um
  modified_base 20: mod_base = cm
  modified_base 21: mod_base = OTHER; note = 2'-O-methyladenosine with a 3'-phosphorothioate linkage
  modified_base 22: mod_base = OTHER; note = 2'-O-methyluridine with a 3'-phosphorothioate linkage
  modified_base 23: mod_base = cm
tcattgtcattcttgatctcatc

SEQ ID NO: 676 - RNA, 21 nt, synthetic construct
  source 1..21: mol_type = other RNA
  modified_base 1: mod_base = OTHER; note = 2'-O-methylcytidine with a 3'-phosphorothioate linkage
  modified_base 2: mod_base = OTHER; note = 2'-O-methyluridine with a 3'-phosphorothioate linkage
  modified_base 3: mod_base = um
  modified_base 4: mod_base = um
  modified_base 5: mod_base = gm
  modified_base 6: mod_base = um
  modified_base 7: mod_base = OTHER; note = 2'-fluoroadenosine
  modified_base 8: mod_base = cm
  modified_base 9: mod_base = OTHER; note = 2'-fluorouridine
  modified_base 10: mod_base = OTHER; note = 2'-fluorocytidine
  modified_base 11: mod_base = OTHER; note = 2'-fluorouridine
  modified_base 12: mod_base = um
  modified_base 13: mod_base = gm
  modified_base 14: mod_base = cm
  modified_base 15: mod_base = OTHER; note = 2'-O-methyladenosine
  modified_base 16: mod_base = gm
  modified_base 17: mod_base = OTHER; note = 2'-O-methyladenosine
  modified_base 18: mod_base = gm
  modified_base 19: mod_base = OTHER; note = 2'-O-methyladenosine with a 3'-phosphorothioate linkage
  modified_base 20: mod_base = OTHER; note = 2'-O-methyladenosine with a 3'-phosphorothioate linkage
  modified_base 21: mod_base = OTHER; note = 2'-O-methyladenosine
ctttgtactcttgcagagaaa

SEQ ID NO: 677 - RNA, 23 nt, synthetic construct
  source 1..23: mol_type = other RNA
  modified_base 1: mod_base = OTHER; note = 2'-O-methyluridine with a 3'-phosphorothioate linkage
  modified_base 2: mod_base = OTHER; note = 2'-fluorouridine with a 3'-phosphorothioate linkage
  modified_base 3: mod_base = um
  modified_base 4: mod_base = cm
  modified_base 5: mod_base = um
  modified_base 6: mod_base = OTHER; note = 2'-fluorocytidine
  modified_base 7: mod_base = um
  modified_base 8: mod_base = gm
  modified_base 9: mod_base = cm
  modified_base 10: mod_base = OTHER; note = 2'-O-methyladenosine
  modified_base 11: mod_base = OTHER; note = 2'-O-methyladenosine
  modified_base 12: mod_base = gm
  modified_base 13: mod_base = OTHER; note = 2'-O-methyladenosine
  modified_base 14: mod_base = OTHER; note = 2'-fluoroguanosine
  modified_base 15: mod_base = um
  modified_base 16: mod_base = OTHER; note = 2'-fluoroadenosine
  modified_base 17: mod_base = cm
  modified_base 18: mod_base = OTHER; note = 2'-O-methyladenosine
  modified_base 19: mod_base = OTHER; note = 2'-O-methyladenosine
  modified_base 20: mod_base = OTHER; note = 2'-O-methyladenosine
  modified_base 21: mod_base = OTHER; note = 2'-O-methylguanosine with a 3'-phosphorothioate linkage
  modified_base 22: mod_base = OTHER; note = 2'-O-methyladenosine with a 3'-phosphorothioate linkage
  modified_base 23: mod_base = um
tttctctgcaagagtacaaagat

SEQ ID NO: 678 - RNA, 21 nt, synthetic construct
  source 1..21: mol_type = other RNA
  modified_base 1: mod_base = OTHER; note = 2'-O-methyluridine with a 3'-phosphorothioate linkage
  modified_base 2: mod_base = OTHER; note = 2'-O-methylguanosine with a 3'-phosphorothioate linkage
  modified_base 3: mod_base = OTHER; note = 2'-O-methyladenosine
  modified_base 4: mod_base = OTHER; note = 2'-O-methyladenosine
  modified_base 5: mod_base = gm
  modified_base 6: mod_base = cm
  modified_base 7: mod_base = OTHER; note = 2'-fluorocytidine
  modified_base 8: mod_base = OTHER; note = 2'-O-methyladenosine
  modified_base 9: mod_base = OTHER; note = 2'-fluoroadenosine
  modified_base 10: mod_base = OTHER; note = 2'-fluoroadenosine
  modified_base 11: mod_base = OTHER; note = 2'-fluoroadenosine
  modified_base 12: mod_base = um
  modified_base 13: mod_base = OTHER; note = 2'-O-methyladenosine
  modified_base 14: mod_base = gm
  modified_base 15: mod_base = OTHER; note = 2'-O-methyladenosine
  modified_base 16: mod_base = um
  modified_base 17: mod_base = gm
  modified_base 18: mod_base = OTHER; note = 2'-O-methyladenosine
  modified_base 19: mod_base = OTHER; note = 2'-O-methylguanosine with a 3'-phosphorothioate linkage
  modified_base 20: mod_base = OTHER; note = 2'-O-methyladenosine with a 3'-phosphorothioate linkage
  modified_base 21: mod_base = OTHER; note = 2'-O-methyladenosine
tgaagccaaaatagatgagaa

SEQ ID NO: 679 - RNA, 23 nt, synthetic construct
  source 1..23: mol_type = other RNA
  modified_base 1: mod_base = OTHER; note = 2'-O-methyluridine with a 3'-phosphorothioate linkage
  modified_base 2: mod_base = OTHER; note = 2'-fluorouridine with a 3'-phosphorothioate linkage
  modified_base 3: mod_base = cm
  modified_base 4: mod_base = um
  modified_base 5: mod_base = cm
  modified_base 6: mod_base = OTHER; note = 2'-fluoroadenosine
  modified_base 7: mod_base = um
  modified_base 8: mod_base = cm
  modified_base 9: mod_base = um
  modified_base 10: mod_base = OTHER; note = 2'-O-methyladenosine
  modified_base 11: mod_base = um
  modified_base 12: mod_base = um
  modified_base 13: mod_base = um
  modified_base 14: mod_base = OTHER; note = 2'-fluorouridine
  modified_base 15: mod_base = gm
  modified_base 16: mod_base = OTHER; note = 2'-fluoroguanosine
  modified_base 17: mod_base = cm
  modified_base 18: mod_base = um
  modified_base 19: mod_base = um
  modified_base 20: mod_base = cm
  modified_base 21: mod_base = OTHER; note = 2'-O-methyladenosine with a 3'-phosphorothioate linkage
  modified_base 22: mod_base = OTHER; note = 2'-O-methyluridine with a 3'-phosphorothioate linkage
  modified_base 23: mod_base = um
ttctcatctattttggcttcatt

SEQ ID NO: 680 - RNA, 21 nt, synthetic construct
  source 1..21: mol_type = other RNA
  modified_base 1: mod_base = OTHER; note = 2'-O-methylcytidine with a 3'-phosphorothioate linkage
  modified_base 2: mod_base = OTHER; note = 2'-O-methyladenosine with a 3'-phosphorothioate linkage
  modified_base 3: mod_base = um
  modified_base 4: mod_base = cm
  modified_base 5: mod_base = cm
  modified_base 6: mod_base = um
  modified_base 7: mod_base = OTHER; note = 2'-fluorocytidine
  modified_base 8: mod_base = OTHER; note = 2'-O-methyladenosine
  modified_base 9: mod_base = OTHER; note = 2'-fluoroadenosine
  modified_base 10: mod_base = OTHER; note = 2'-fluoroguanosine
  modified_base 11: mod_base = OTHER; note = 2'-fluoroguanosine
  modified_base 12: mod_base = OTHER; note = 2'-O-methyladenosine
  modified_base 13: mod_base = cm
  modified_base 14: mod_base = OTHER; note = 2'-O-methyladenosine
  modified_base 15: mod_base = um
  modified_base 16: mod_base = um
  modified_base 17: mod_base = OTHER; note = 2'-O-methyladenosine
  modified_base 18: mod_base = cm
  modified_base 19: mod_base = OTHER; note = 2'-O-methyluridine with a 3'-phosphorothioate linkage
  modified_base 20: mod_base = OTHER; note = 2'-O-methyladenosine with a 3'-phosphorothioate linkage
  modified_base 21: mod_base = OTHER; note = 2'-O-methyladenosine
catcctcaaggacattactaa

SEQ ID NO: 681 - RNA, 23 nt, synthetic construct
  source 1..23: mol_type = other RNA
  modified_base 1: mod_base = OTHER; note = 2'-O-methyluridine with a 3'-phosphorothioate linkage
  modified_base 2: mod_base = OTHER; note = 2'-fluorouridine with a 3'-phosphorothioate linkage
  modified_base 3: mod_base = OTHER; note = 2'-O-methyladenosine
  modified_base 4: mod_base = gm
  modified_base 5: mod_base = um
  modified_base 6: mod_base = OTHER; note = 2'-fluoroadenosine
  modified_base 7: mod_base = OTHER; note = 2'-O-methyladenosine
  modified_base 8: mod_base = um
  modified_base 9: mod_base = gm
  modified_base 10: mod_base = um
  modified_base 11: mod_base = cm
  modified_base 12: mod_base = cm
  modified_base 13: mod_base = um
  modified_base 14: mod_base = OTHER; note = 2'-fluorouridine
  modified_base 15: mod_base = gm
  modified_base 16: mod_base = OTHER; note = 2'-fluoroadenosine
  modified_base 17: mod_base = gm
  modified_base 18: mod_base = gm
  modified_base 19: mod_base = OTHER; note = 2'-O-methyladenosine
  modified_base 20: mod_base = um
  modified_base 21: mod_base = OTHER; note = 2'-O-methylguanosine with a 3'-phosphorothioate linkage
  modified_base 22: mod_base = OTHER; note = 2'-O-methyladenosine with a 3'-phosphorothioate linkage
  modified_base 23: mod_base = um
ttagtaatgtccttgaggatgat

SEQ ID NO: 682 - RNA, 21 nt, synthetic construct
  source 1..21: mol_type = other RNA
  modified_base 1: mod_base = OTHER; note = 2'-O-methyluridine with a 3'-phosphorothioate linkage
  modified_base 2: mod_base = OTHER; note = 2'-O-methyladenosine with a 3'-phosphorothioate linkage
  modified_base 3: mod_base = um
  modified_base 4: mod_base = gm
  modified_base 5: mod_base = um
  modified_base 6: mod_base = gm
  modified_base 7: mod_base = OTHER; note = 2'-fluoroadenosine
  modified_base 8: mod_base = OTHER; note = 2'-O-methyladenosine
  modified_base 9: mod_base = OTHER; note = 2'-fluorocytidine
  modified_base 10: mod_base = OTHER; note = 2'-fluoroadenosine
  modified_base 11: mod_base = OTHER; note = 2'-fluorocytidine
  modified_base 12: mod_base = um
  modified_base 13: mod_base = gm
  modified_base 14: mod_base = um
  modified_base 15: mod_base = gm
  modified_base 16: mod_base = OTHER; note = 2'-O-methyladenosine
  modified_base 17: mod_base = cm
  modified_base 18: mod_base = cm
  modified_base 19: mod_base = OTHER; note = 2'-O-methylcytidine with a 3'-phosphorothioate linkage
  modified_base 20: mod_base = OTHER; note = 2'-O-methyluridine with a 3'-phosphorothioate linkage
  modified_base 21: mod_base = OTHER; note = 2'-O-methyladenosine
tatgtgaacactgtgacccta

SEQ ID NO: 683 - RNA, 23 nt, synthetic construct
  source 1..23: mol_type = other RNA
  modified_base 1: mod_base = OTHER; note = 2'-O-methyluridine with a 3'-phosphorothioate linkage
  modified_base 2: mod_base = OTHER; note = 2'-fluoroadenosine with a 3'-phosphorothioate linkage
  modified_base 3: mod_base = gm
  modified_base 4: mod_base = gm
  modified_base 5: mod_base = gm
  modified_base 6: mod_base = OTHER; note = 2'-fluorouridine
  modified_base 7: mod_base = cm
  modified_base 8: mod_base = OTHER; note = 2'-O-methyladenosine
  modified_base 9: mod_base = cm
  modified_base 10: mod_base = OTHER; note = 2'-O-methyladenosine
  modified_base 11: mod_base = gm
  modified_base 12: mod_base = um
  modified_base 13: mod_base = gm
  modified_base 14: mod_base = OTHER; note = 2'-fluorouridine
  modified_base 15: mod_base = um
  modified_base 16: mod_base = OTHER; note = 2'-fluorocytidine
  modified_base 17: mod_base = OTHER; note = 2'-O-methyladenosine
  modified_base 18: mod_base = cm
  modified_base 19: mod_base = OTHER; note = 2'-O-methyladenosine
  modified_base 20: mod_base = um
  modified_base 21: mod_base = OTHER; note = 2'-O-methyladenosine with a 3'-phosphorothioate linkage
  modified_base 22: mod_base = OTHER; note = 2'-O-methylcytidine with a 3'-phosphorothioate linkage
  modified_base 23: mod_base = OTHER; note = 2'-O-methyladenosine
tagggtcacagtgttcacataca

SEQ ID NO: 684 - RNA, 21 nt, synthetic construct
  source 1..21: mol_type = other RNA
  modified_base 1: mod_base = OTHER; note = 2'-O-methylguanosine with a 3'-phosphorothioate linkage
  modified_base 2: mod_base = OTHER; note = 2'-O-methyluridine with a 3'-phosphorothioate linkage
  modified_base 3: mod_base = gm
  modified_base 4: mod_base = um
  modified_base 5: mod_base = um
  modified_base 6: mod_base = OTHER; note = 2'-O-methyladenosine
  modified_base 7: mod_base = OTHER; note = 2'-fluoroadenosine
  modified_base 8: mod_base = um
  modified_base 9: mod_base = OTHER; note = 2'-fluoroguanosine
  modified_base 10: mod_base = OTHER; note = 2'-fluorocytidine
  modified_base 11: mod_base = OTHER; note = 2'-fluorocytidine
  modified_base 12: mod_base = cm
  modified_base 13: mod_base = OTHER; note = 2'-O-methyladenosine
  modified_base 14: mod_base = OTHER; note = 2'-O-methyladenosine
  modified_base 15: mod_base = gm
  modified_base 16: mod_base = um
  modified_base 17: mod_base = gm
  modified_base 18: mod_base = OTHER; note = 2'-O-methyladenosine
  modified_base 19: mod_base = OTHER; note = 2'-O-methylcytidine with a 3'-phosphorothioate linkage
  modified_base 20: mod_base = OTHER; note = 2'-O-methyluridine with a 3'-phosphorothioate linkage
  modified_base 21: mod_base = OTHER; note = 2'-O-methyladenosine
gtgttaatgcccaagtgacta

SEQ ID NO: 685 - RNA, 23 nt, synthetic construct
  source 1..23: mol_type = other RNA
  modified_base 1: mod_base = OTHER; note = 2'-O-methyluridine with a 3'-phosphorothioate linkage
  modified_base 2: mod_base = OTHER; note = 2'-fluoroadenosine with a 3'-phosphorothioate linkage
  modified_base 3: mod_base = gm
  modified_base 4: mod_base = um
  modified_base 5: mod_base = cm
  modified_base 6: mod_base = OTHER; note = 2'-fluoroadenosine
  modified_base 7: mod_base = cm
  modified_base 8: mod_base = um
  modified_base 9: mod_base = um
  modified_base 10: mod_base = gm
  modified_base 11: mod_base = gm
  modified_base 12: mod_base = gm
  modified_base 13: mod_base = cm
  modified_base 14: mod_base = OTHER; note = 2'-fluoroadenosine
  modified_base 15: mod_base = um
  modified_base 16: mod_base = OTHER; note = 2'-fluorouridine
  modified_base 17: mod_base = OTHER; note = 2'-O-methyladenosine
  modified_base 18: mod_base = OTHER; note = 2'-O-methyladenosine
  modified_base 19: mod_base = cm
  modified_base 20: mod_base = OTHER; note = 2'-O-methyladenosine
  modified_base 21: mod_base = OTHER; note = 2'-O-methylcytidine with a 3'-phosphorothioate linkage
  modified_base 22: mod_base = OTHER; note = 2'-O-methyluridine with a 3'-phosphorothioate linkage
  modified_base 23: mod_base = um
tagtcacttgggcattaacactt

SEQ ID NO: 686 - RNA, 21 nt, synthetic construct
  source 1..21: mol_type = other RNA
  modified_base 1: mod_base = OTHER; note = 2'-O-methyluridine with a 3'-phosphorothioate linkage
  modified_base 2: mod_base = OTHER; note = 2'-O-methyluridine with a 3'-phosphorothioate linkage
  modified_base 3: mod_base = cm
  modified_base 4: mod_base = OTHER; note = 2'-O-methyladenosine
  modified_base 5: mod_base = OTHER; note = 2'-O-methyladenosine
  modified_base 6: mod_base = cm
  modified_base 7: mod_base = OTHER; note = 2'-fluorouridine
  modified_base 8: mod_base = gm
  modified_base 9: mod_base = OTHER; note = 2'-fluorocytidine
  modified_base 10: mod_base = OTHER; note = 2'-fluorouridine
  modified_base 11: mod_base = OTHER; note = 2'-fluorouridine
  modified_base 12: mod_base = cm
  modified_base 13: mod_base = gm
  modified_base 14: mod_base = um
  modified_base 15: mod_base = OTHER; note = 2'-O-methyladenosine
  modified_base 16: mod_base = OTHER; note = 2'-O-methyladenosine
  modified_base 17: mod_base = um
  modified_base 18: mod_base = um
  modified_base 19: mod_base = OTHER; note = 2'-O-methylguanosine with a 3'-phosphorothioate linkage
  modified_base 20: mod_base = OTHER; note = 2'-O-methylguanosine with a 3'-phosphorothioate linkage
  modified_base 21: mod_base = OTHER; note = 2'-O-methyladenosine
ttcaactgcttcgtaattgga

SEQ ID NO: 687 - RNA, 23 nt, synthetic construct
  source 1..23: mol_type = other RNA
  modified_base 1: mod_base = OTHER; note = 2'-O-methyluridine with a 3'-phosphorothioate linkage
  modified_base 2: mod_base = OTHER; note = 2'-fluorocytidine with a 3'-phosphorothioate linkage
  modified_base 3: mod_base = cm
  modified_base 4: mod_base = OTHER; note = 2'-O-methyladenosine
  modified_base 5: mod_base = OTHER; note = 2'-O-methyladenosine
  modified_base 6: mod_base = OTHER; note = 2'-fluorouridine
  modified_base 7: mod_base = um
  modified_base 8: mod_base = OTHER; note = 2'-O-methyladenosine
  modified_base 9: mod_base = cm
  modified_base 10: mod_base = gm
  modified_base 11: mod_base = OTHER; note = 2'-O-methyladenosine
  modified_base 12: mod_base = OTHER; note = 2'-O-methyladenosine
  modified_base 13: mod_base = gm
  modified_base 14: mod_base = OTHER; note = 2'-fluorocytidine
  modified_base 15: mod_base = OTHER; note = 2'-O-methyladenosine
  modified_base 16: mod_base = OTHER; note = 2'-fluoroguanosine
  modified_base 17: mod_base = um
  modified_base 18: mod_base = um
  modified_base 19: mod_base = gm
  modified_base 20: mod_base = OTHER; note = 2'-O-methyladenosine
  modified_base 21: mod_base = OTHER; note = 2'-O-methyladenosine with a 3'-phosphorothioate linkage
  modified_base 22: mod_base = OTHER; note = 2'-O-methylcytidine with a 3'-phosphorothioate linkage
  modified_base 23: mod_base = um
tccaattacgaagcagttgaact

SEQ ID NO: 688 - RNA, 21 nt, synthetic construct
  source 1..21: mol_type = other RNA
  modified_base 1: mod_base = OTHER; note = 2'-O-methyluridine with a 3'-phosphorothioate linkage
  modified_base 2: mod_base = OTHER; note = 2'-O-methylguanosine with a 3'-phosphorothioate linkage
  modified_base 3: mod_base = cm
  modified_base 4: mod_base = OTHER; note = 2'-O-methyladenosine
  modified_base 5: mod_base = gm
  modified_base 6: mod_base = OTHER; note = 2'-O-methyladenosine
  modified_base 7: mod_base = OTHER; note = 2'-fluoroadenosine
  modified_base 8: mod_base = gm
  modified_base 9: mod_base = OTHER; note = 2'-fluoroadenosine
  modified_base 10: mod_base = OTHER; note = 2'-fluorouridine
  modified_base 11: mod_base = OTHER; note = 2'-fluoroguanosine
  modified_base 12: mod_base = um
  modified_base 13: mod_base = OTHER; note = 2'-O-methyladenosine
  modified_base 14: mod_base = gm
  modified_base 15: mod_base = OTHER; note = 2'-O-methyladenosine
  modified_base 16: mod_base = um
  modified_base 17: mod_base = um
  modified_base 18: mod_base = gm
  modified_base 19: mod_base = OTHER; note = 2'-O-methyluridine with a 3'-phosphorothioate linkage
  modified_base 20: mod_base = OTHER; note = 2'-O-methylguanosine with a 3'-phosphorothioate linkage
  modified_base 21: mod_base = OTHER; note = 2'-O-methyladenosine
tgcagaagatgtagattgtga

SEQ ID NO: 689 - RNA, 23 nt, synthetic construct
  source 1..23: mol_type = other RNA
  modified_base 1: mod_base = OTHER; note = 2'-O-methyluridine with a 3'-phosphorothioate linkage
  modified_base 2: mod_base = OTHER; note = 2'-fluorocytidine with a 3'-phosphorothioate linkage
  modified_base 3: mod_base = OTHER; note = 2'-O-methyladenosine
  modified_base 4: mod_base = cm
  modified_base 5: mod_base = OTHER; note = 2'-O-methyladenosine
  modified_base 6: mod_base = OTHER; note = 2'-fluoroadenosine
  modified_base 7: mod_base = um
  modified_base 8: mod_base = cm
  modified_base 9: mod_base = um
  modified_base 10: mod_base = OTHER; note = 2'-O-methyladenosine
  modified_base 11: mod_base = cm
  modified_base 12: mod_base = OTHER; note = 2'-O-methyladenosine
  modified_base 13: mod_base = um
  modified_base 14: mod_base = OTHER; note = 2'-fluorocytidine
  modified_base 15: mod_base = um
  modified_base 16: mod_base = OTHER; note = 2'-fluorouridine
  modified_base 17: mod_base = cm
  modified_base 18: mod_base = um
  modified_base 19: mod_base = gm
  modified_base 20: mod_base = cm
  modified_base 21: mod_base = OTHER; note = 2'-O-methyladenosine with a 3'-phosphorothioate linkage
  modified_base 22: mod_base = OTHER; note = 2'-O-methyluridine with a 3'-phosphorothioate linkage
  modified_base 23: mod_base = um
tcacaatctacatcttctgcatt

SEQ ID NO: 690 - RNA, 21 nt, synthetic construct
  source 1..21: mol_type = other RNA
  modified_base 1: mod_base = OTHER; note = 2'-O-methylguanosine with a 3'-phosphorothioate linkage
  modified_base 2: mod_base = OTHER; note = 2'-O-methyladenosine with a 3'-phosphorothioate linkage
  modified_base 3: mod_base = gm
  modified_base 4: mod_base = um
  modified_base 5: mod_base = OTHER; note = 2'-O-methyladenosine
  modified_base 6: mod_base = OTHER; note = 2'-O-methyladenosine
  modified_base 7: mod_base = OTHER; note = 2'-fluoroadenosine
  modified_base 8: mod_base = um
  modified_base 9: mod_base = OTHER; note = 2'-fluoroadenosine
  modified_base 10: mod_base = OTHER; note = 2'-fluorouridine
  modified_base 11: mod_base = OTHER; note = 2'-fluoroadenosine
  modified_base 12: mod_base = um
  modified_base 13: mod_base = cm
  modified_base 14: mod_base = OTHER; note = 2'-O-methyladenosine
  modified_base 15: mod_base = cm
  modified_base 16: mod_base = cm
  modified_base 17: mod_base = OTHER; note = 2'-O-methyladenosine
  modified_base 18: mod_base = cm
  modified_base 19: mod_base = OTHER; note = 2'-O-methyluridine with a 3'-phosphorothioate linkage
  modified_base 20: mod_base = OTHER; note = 2'-O-methyladenosine with a 3'-phosphorothioate linkage
  modified_base 21: mod_base = OTHER; note = 2'-O-methyladenosine
gagtaaatatatcaccactaa

SEQ ID NO: 691 - RNA, 23 nt, synthetic construct
  source 1..23: mol_type = other RNA
  modified_base 1: mod_base = OTHER; note = 2'-O-methyluridine with a 3'-phosphorothioate linkage
  modified_base 2: mod_base = OTHER; note = 2'-fluorouridine with a 3'-phosphorothioate linkage
  modified_base 3: mod_base = OTHER; note = 2'-O-methyladenosine
  modified_base 4: mod_base = gm
  modified_base 5: mod_base = um
  modified_base 6: mod_base = OTHER; note = 2'-fluoroguanosine
  modified_base 7: mod_base = gm
  modified_base 8: mod_base = um
  modified_base 9: mod_base = gm
  modified_base 10: mod_base = OTHER; note = 2'-O-methyladenosine
  modified_base 11: mod_base = um
  modified_base 12: mod_base = OTHER; note = 2'-O-methyladenosine
  modified_base 13: mod_base = um
  modified_base 14: mod_base = OTHER; note = 2'-fluoroadenosine
  modified_base 15: mod_base = um
  modified_base 16: mod_base = OTHER; note = 2'-fluorouridine
  modified_base 17: mod_base = um
  modified_base 18: mod_base = OTHER; note = 2'-O-methyladenosine
  modified_base 19: mod_base = cm
  modified_base 20: mod_base = um
  modified_base 21: mod_base = OTHER; note = 2'-O-methylcytidine with a 3'-phosphorothioate linkage
  modified_base 22: mod_base = OTHER; note = 2'-O-methyladenosine with a 3'-phosphorothioate linkage
  modified_base 23: mod_base = OTHER; note = 2'-O-methyladenosine
ttagtggtgatatatttactcaa

SEQ ID NO: 692 - RNA, 21 nt, synthetic construct
  source 1..21: mol_type = other RNA
  modified_base 1: mod_base = OTHER; note = 2'-O-methylcytidine with a 3'-phosphorothioate linkage
  modified_base 2: mod_base = OTHER; note = 2'-O-methyladenosine with a 3'-phosphorothioate linkage
  modified_base 3: mod_base = OTHER; note = 2'-O-methyladenosine
  modified_base 4: mod_base = gm
  modified_base 5: mod_base = gm
  modified_base 6: mod_base = OTHER; note = 2'-O-methyladenosine
  modified_base 7: mod_base = OTHER; note = 2'-fluoroadenosine
  modified_base 8: mod_base = um
  modified_base 9: mod_base = OTHER; note = 2'-fluoroguanosine
  modified_base 10: mod_base = OTHER; note = 2'-fluorocytidine
  modified_base 11: mod_base = OTHER; note = 2'-fluoroadenosine
  modified_base 12: mod_base = cm
  modified_base 13: mod_base = OTHER; note = 2'-O-methyladenosine
  modified_base 14: mod_base = cm
  modified_base 15: mod_base = um
  modified_base 16: mod_base = cm
  modified_base 17: mod_base = OTHER; note = 2'-O-methyladenosine
  modified_base 18: mod_base = cm
  modified_base 19: mod_base = OTHER; note = 2'-O-methylcytidine with a 3'-phosphorothioate linkage
  modified_base 20: mod_base = OTHER; note = 2'-O-methyladenosine with a 3'-phosphorothioate linkage
  modified_base 21: mod_base = OTHER; note = 2'-O-methyladenosine
caaggaatgcacactcaccaa

SEQ ID NO: 693 - RNA, 23 nt, synthetic construct
  source 1..23: mol_type = other RNA
  modified_base 1: mod_base = OTHER; note = 2'-O-methyluridine with a 3'-phosphorothioate linkage
  modified_base 2: mod_base = OTHER; note = 2'-fluorouridine with a 3'-phosphorothioate linkage
  modified_base 3: mod_base = gm
  modified_base 4: mod_base = gm
  modified_base 5: mod_base = um
  modified_base 6: mod_base = OTHER; note = 2'-fluoroguanosine
  modified_base 7: mod_base = OTHER; note = 2'-O-methyladenosine
  modified_base 8: mod_base = gm
  modified_base 9: mod_base = um
  modified_base 10: mod_base = gm
  modified_base 11: mod_base = um
  modified_base 12: mod_base = gm
  modified_base 13: mod_base = cm
  modified_base 14: mod_base = OTHER; note = 2'-fluoroadenosine
  modified_base 15: mod_base = um
  modified_base 16: mod_base = OTHER; note = 2'-fluorouridine
  modified_base 17: mod_base = cm
  modified_base 18: mod_base = cm
  modified_base 19: mod_base = um
  modified_base 20: mod_base = um
  modified_base 21: mod_base = OTHER; note = 2'-O-methylguanosine with a 3'-phosphorothioate linkage
  modified_base 22: mod_base = OTHER; note = 2'-O-methyladenosine with a 3'-phosphorothioate linkage
  modified_base 23: mod_base = um
ttggtgagtgtgcattccttgat

SEQ ID NO: 694 - RNA, 21 nt, synthetic construct
  source 1..21: mol_type = other RNA
  modified_base 1: mod_base = OTHER; note = 2'-O-methylcytidine with a 3'-phosphorothioate linkage
  modified_base 2: mod_base = OTHER; note = 2'-O-methyladenosine with a 3'-phosphorothioate linkage
  modified_base 3: mod_base = gm
  modified_base 4: mod_base = gm
  modified_base 5: mod_base = um
  modified_base 6: mod_base = gm
  modified_base 7: mod_base = OTHER; note = 2'-fluoroadenosine
  modified_base 8: mod_base = OTHER; note = 2'-O-methyladenosine
  modified_base 9: mod_base = OTHER; note = 2'-fluoroadenosine
  modified_base 10: mod_base = OTHER; note = 2'-fluoroguanosine
  modified_base 11: mod_base = OTHER; note = 2'-fluoroguanosine
  modified_base 12: mod_base = OTHER; note = 2'-O-methyladenosine
  modified_base 13: mod_base = OTHER; note = 2'-O-methyladenosine
  modified_base 14: mod_base = OTHER; note = 2'-O-methyladenosine
  modified_base 15: mod_base = gm
  modified_base 16: mod_base = cm
  modified_base 17: mod_base = um
  modified_base 18: mod_base = OTHER; note = 2'-O-methyladenosine
  modified_base 19: mod_base = OTHER; note = 2'-O-methylguanosine with a 3'-phosphorothioate linkage
  modified_base 20: mod_base = OTHER; note = 2'-O-methylguanosine with a 3'-phosphorothioate linkage
  modified_base 21: mod_base = OTHER; note = 2'-O-methyladenosine
caggtgaaaggaaagctagga

SEQ ID NO: 695 - RNA, 23 nt, synthetic construct
  source 1..23: mol_type = other RNA
  modified_base 1: mod_base = OTHER; note = 2'-O-methyluridine with a 3'-phosphorothioate linkage
  modified_base 2: mod_base = OTHER; note = 2'-fluorocytidine with a 3'-phosphorothioate linkage
  modified_base 3: mod_base = cm
  modified_base 4: mod_base = um
  modified_base 5: mod_base = OTHER; note = 2'-O-methyladenosine
  modified_base 6: mod_base = OTHER; note = 2'-fluoroguanosine
  modified_base 7: mod_base = cm
  modified_base 8: mod_base = um
  modified_base 9: mod_base = um
  modified_base 10: mod_base = um
  modified_base 11: mod_base = cm
  modified_base 12: mod_base = cm
  modified_base 13: mod_base = um
  modified_base 14: mod_base = OTHER; note = 2'-fluorouridine
  modified_base 15: mod_base = um
  modified_base 16: mod_base = OTHER; note = 2'-fluorocytidine
  modified_base 17: mod_base = OTHER; note = 2'-O-methyladenosine
  modified_base 18: mod_base = cm
  modified_base 19: mod_base = cm
  modified_base 20: mod_base = um
  modified_base 21: mod_base = OTHER; note = 2'-O-methylguanosine with a 3'-phosphorothioate linkage
  modified_base 22: mod_base = OTHER; note = 2'-O-methylguanosine with a 3'-phosphorothioate linkage
  modified_base 23: mod_base = OTHER; note = 2'-O-methyladenosine
tcctagctttcctttcacctgga

SEQ ID NO: 696 - RNA, 21 nt, synthetic construct
  source 1..21: mol_type = other RNA
  modified_base 1: mod_base = OTHER; note = 2'-O-methyladenosine with a 3'-phosphorothioate linkage
  modified_base 2: mod_base = OTHER; note = 2'-O-methyladenosine with a 3'-phosphorothioate linkage
  modified_base 3: mod_base = um
  modified_base 4: mod_base = gm
  modified_base 5: mod_base = OTHER; note = 2'-O-methyladenosine
  modified_base 6: mod_base = cm
  modified_base 7: mod_base = OTHER; note = 2'-fluoroadenosine
  modified_base 8: mod_base = OTHER; note = 2'-O-methyladenosine
  modified_base 9: mod_base = OTHER; note = 2'-fluorouridine
  modified_base 10: mod_base = OTHER; note = 2'-fluoroguanosine
  modified_base 11: mod_base = OTHER; note = 2'-fluorouridine
  modified_base 12: mod_base = cm
  modified_base 13: mod_base = cm
  modified_base 14: mod_base = OTHER; note = 2'-O-methyladenosine
  modified_base 15: mod_base = OTHER; note = 2'-O-methyladenosine
  modified_base 16: mod_base = gm
  modified_base 17: mod_base = OTHER; note = 2'-O-methyladenosine
  modified_base 18: mod_base = cm
  modified_base 19: mod_base = OTHER; note = 2'-O-methyladenosine with a 3'-phosphorothioate linkage
  modified_base 20: mod_base = OTHER; note = 2'-O-methylcytidine with a 3'-phosphorothioate linkage
  modified_base 21: mod_base = OTHER; note = 2'-O-methyladenosine
aatgacaatgtccaagacaca

SEQ ID NO: 697 - RNA, 23 nt, synthetic construct
  source 1..23: mol_type = other RNA
  modified_base 1: mod_base = OTHER; note = 2'-O-methyluridine with a 3'-phosphorothioate linkage
  modified_base 2: mod_base = OTHER; note = 2'-fluoroguanosine with a 3'-phosphorothioate linkage
  modified_base 3: mod_base = um
  modified_base 4: mod_base = gm
  modified_base 5: mod_base = um
  modified_base 6: mod_base = OTHER; note = 2'-fluorocytidine
  modified_base 7: mod_base = um
  modified_base 8: mod_base = um
  modified_base 9: mod_base = gm
  modified_base 10: mod_base = gm
  modified_base 11: mod_base = OTHER; note = 2'-O-methyladenosine
  modified_base 12: mod_base = cm
  modified_base 13: mod_base = OTHER; note = 2'-O-methyladenosine
  modified_base 14: mod_base = OTHER; note = 2'-fluorouridine
  modified_base 15: mod_base = um
  modified_base 16: mod_base = OTHER; note = 2'-fluoroguanosine
  modified_base 17: mod_base = um
  modified_base 18: mod_base = cm
  modified_base 19: mod_base = OTHER; note = 2'-O-methyladenosine
  modified_base 20: mod_base = um
  modified_base 21: mod_base = OTHER; note = 2'-O-methyluridine with a 3'-phosphorothioate linkage
  modified_base 22: mod_base = OTHER; note = 2'-O-methylcytidine with a 3'-phosphorothioate linkage
  modified_base 23: mod_base = um
tgtgtcttggacattgtcattct

SEQ ID NO: 698 - RNA, 21 nt, synthetic construct
  source 1..21: mol_type = other RNA
  modified_base 1: mod_base = OTHER; note = 2'-O-methylguanosine with a 3'-phosphorothioate linkage
  modified_base 2: mod_base = OTHER; note = 2'-O-methylguanosine with a 3'-phosphorothioate linkage
  modified_base 3: mod_base = OTHER; note = 2'-O-methyladenosine
  modified_base 4: mod_base = OTHER; note = 2'-O-methyladenosine
  modified_base 5: mod_base = um
  modified_base 6: mod_base = gm
  modified_base 7: mod_base = OTHER; note = 2'-fluorocytidine
  modified_base 8: mod_base = OTHER; note = 2'-O-methyladenosine
  modified_base 9: mod_base = OTHER; note = 2'-fluorocytidine
  modified_base 10: mod_base = OTHER; note = 2'-fluoroadenosine
  modified_base 11: mod_base = OTHER; note = 2'-fluorocytidine
  modified_base 12: mod_base = um
  modified_base 13: mod_base = cm
  modified_base 14: mod_base = OTHER; note = 2'-O-methyladenosine
  modified_base 15: mod_base = cm
  modified_base 16: mod_base = cm
  modified_base 17: mod_base = OTHER; note = 2'-O-methyladenosine
  modified_base 18: mod_base = gm
  modified_base 19: mod_base = OTHER; note = 2'-O-methylcytidine with a 3'-phosphorothioate linkage
  modified_base 20: mod_base = OTHER; note = 2'-O-methyladenosine with a 3'-phosphorothioate linkage
  modified_base 21: mod_base = OTHER; note = 2'-O-methyladenosine
ggaatgcacactcaccagcaa

SEQ ID NO: 699 - RNA, 23 nt, synthetic construct
  source 1..23: mol_type = other RNA
  modified_base 1: mod_base = OTHER; note = 2'-O-methyluridine with a 3'-phosphorothioate linkage
  modified_base 2: mod_base = OTHER; note = 2'-fluorouridine with a 3'-phosphorothioate linkage
  modified_base 3: mod_base = gm
  modified_base 4: mod_base = cm
  modified_base 5: mod_base = um
  modified_base 6: mod_base = OTHER; note = 2'-fluoroguanosine
  modified_base 7: mod_base = gm
  modified_base 8: mod_base = um
  modified_base 9: mod_base = gm
  modified_base 10: mod_base = OTHER; note = 2'-O-methyladenosine
  modified_base 11: mod_base = gm
  modified_base 12: mod_base = um
  modified_base 13: mod_base = gm
  modified_base 14: mod_base = OTHER; note = 2'-fluorouridine
  modified_base 15: mod_base = gm
  modified_base 16: mod_base = OTHER; note = 2'-fluorocytidine
  modified_base 17: mod_base = OTHER; note = 2'-O-methyladenosine
  modified_base 18: mod_base = um
  modified_base 19: mod_base = um
  modified_base 20: mod_base = cm
  modified_base 21: mod_base = OTHER; note = 2'-O-methylcytidine with a 3'-phosphorothioate linkage
  modified_base 22: mod_base = OTHER; note = 2'-O-methyluridine with a 3'-phosphorothioate linkage
  modified_base 23: mod_base = um
ttgctggtgagtgtgcattcctt

SEQ ID NO: 700 - RNA, 21 nt, synthetic construct
  source 1..21: mol_type = other RNA
  modified_base 1: mod_base = OTHER; note = 2'-O-methylcytidine with a 3'-phosphorothioate linkage
  modified_base 2: mod_base = OTHER; note = 2'-O-methylcytidine with a 3'-phosphorothioate linkage
  modified_base 3: mod_base = um
  modified_base 4: mod_base = gm
  modified_base 5: mod_base = um
  modified_base 6: mod_base = cm
  modified_base 7: mod_base = OTHER; note = 2'-fluorocytidine
  modified_base 8: mod_base = um
  modified_base 9: mod_base = OTHER; note = 2'-fluorocytidine
  modified_base 10: mod_base = OTHER; note = 2'-fluorocytidine
  modified_base 11: mod_base = OTHER; note = 2'-fluoroadenosine
  modified_base 12: mod_base = gm
  modified_base 13: mod_base = gm
  modified_base 14: mod_base = um
  modified_base 15: mod_base = gm
  modified_base 16: mod_base = OTHER; note = 2'-O-methyladenosine
  modified_base 17: mod_base = OTHER; note = 2'-O-methyladenosine
  modified_base 18: mod_base = OTHER; note = 2'-O-methyladenosine
  modified_base 19: mod_base = OTHER; note = 2'-O-methylguanosine with a 3'-phosphorothioate linkage
  modified_base 20: mod_base = OTHER; note = 2'-O-methylguanosine with a 3'-phosphorothioate linkage
  modified_base 21: mod_base = OTHER; note = 2'-O-methyladenosine
cctgtcctccaggtgaaagga

SEQ ID NO: 701 - RNA, 23 nt, synthetic construct
  source 1..23: mol_type = other RNA
  modified_base 1: mod_base = OTHER; note = 2'-O-methyluridine with a 3'-phosphorothioate linkage
  modified_base 2: mod_base = OTHER; note = 2'-fluorocytidine with a 3'-phosphorothioate linkage
  modified_base 3: mod_base = cm
  modified_base 4: mod_base = um
  modified_base 5: mod_base = um
  modified_base 6: mod_base = OTHER; note = 2'-fluorouridine
  modified_base 7: mod_base = cm
  modified_base 8: mod_base = OTHER; note = 2'-O-methyladenosine
  modified_base 9: mod_base = cm
  modified_base 10: mod_base = cm
  modified_base 11: mod_base = um
  modified_base 12: mod_base = gm
  modified_base 13: mod_base = gm
  modified_base 14: mod_base = OTHER; note = 2'-fluoroadenosine
  modified_base 15: mod_base = gm
  modified_base 16: mod_base = OTHER; note = 2'-fluoroguanosine
  modified_base 17: mod_base = OTHER; note = 2'-O-methyladenosine
  modified_base 18: mod_base = cm
  modified_base 19: mod_base = OTHER; note = 2'-O-methyladenosine
  modified_base 20: mod_base = gm
  modified_base 21: mod_base = OTHER; note = 2'-O-methylguanosine with a 3'-phosphorothioate linkage
  modified_base 22: mod_base = OTHER; note = 2'-O-methylguanosine with a 3'-phosphorothioate linkage
  modified_base 23: mod_base = cm
tcctttcacctggaggacagggc

SEQ ID NO: 702 - RNA, 21 nt, synthetic construct
  source 1..21: mol_type = other RNA
  modified_base 1: mod_base = OTHER; note = 2'-O-methyladenosine with a 3'-phosphorothioate linkage
  modified_base 2: mod_base = OTHER; note = 2'-O-methyluridine with a 3'-phosphorothioate linkage
  modified_base 3: mod_base = gm
  modified_base 4: mod_base = cm
  modified_base 5: mod_base = OTHER; note = 2'-O-methyladenosine
  modified_base 6: mod_base = gm
  modified_base 7: mod_base = OTHER; note = 2'-fluoroadenosine
  modified_base 8: mod_base = OTHER; note = 2'-O-methyladenosine
  modified_base 9: mod_base = OTHER; note = 2'-fluoroguanosine
  modified_base 10: mod_base = OTHER; note = 2'-fluoroadenosine
  modified_base 11: mod_base = OTHER; note = 2'-fluorouridine
  modified_base 12: mod_base = gm
  modified_base 13: mod_base = um
  modified_base 14: mod_base = OTHER; note = 2'-O-methyladenosine
  modified_base 15: mod_base = gm
  modified_base 16: mod_base = OTHER; note = 2'-O-methyladenosine
  modified_base 17: mod_base = um
  modified_base 18: mod_base = um
  modified_base 19: mod_base = OTHER; note = 2'-O-methylguanosine with a 3'-phosphorothioate linkage
  modified_base 20: mod_base = OTHER; note = 2'-O-methyluridine with a 3'-phosphorothioate linkage
  modified_base 21: mod_base = OTHER; note = 2'-O-methyladenosine
atgcagaagatgtagattgta

SEQ ID NO: 703 - RNA, 23 nt, synthetic construct
  source 1..23: mol_type = other RNA
  modified_base 1: mod_base = OTHER; note = 2'-O-methyluridine with a 3'-phosphorothioate linkage
  modified_base 2: mod_base = OTHER; note = 2'-fluoroadenosine with a 3'-phosphorothioate linkage
  modified_base 3: mod_base = cm
  modified_base 4: mod_base = OTHER; note = 2'-O-methyladenosine
  modified_base 5: mod_base = OTHER; note = 2'-O-methyladenosine
  modified_base 6: mod_base = OTHER; note = 2'-fluorouridine
  modified_base 7: mod_base = cm
  modified_base 8: mod_base = um
  modified_base 9: mod_base = OTHER; note = 2'-O-methyladenosine
  modified_base 10: mod_base = cm
  modified_base 11: mod_base = OTHER; note = 2'-O-methyladenosine
  modified_base 12: mod_base = um
  modified_base 13: mod_base = cm
  modified_base 14: mod_base = OTHER; note = 2'-fluorouridine
  modified_base 15: mod_base = um
  modified_base 16: mod_base = OTHER; note = 2'-fluorocytidine
  modified_base 17: mod_base = um
  modified_base 18: mod_base = gm
  modified_base 19: mod_base = cm
  modified_base 20: mod_base = OTHER; note = 2'-O-methyladenosine
  modified_base 21: mod_base = OTHER; note = 2'-O-methyluridine with a 3'-phosphorothioate linkage
  modified_base 22: mod_base = OTHER; note = 2'-O-methyluridine with a 3'-phosphorothioate linkage
  modified_base 23: mod_base = um
tacaatctacatcttctgcattt

SEQ ID NO: 704 - RNA, 21 nt, synthetic construct
  source 1..21: mol_type = other RNA
  modified_base 1: mod_base = OTHER; note = 2'-O-methyluridine with a 3'-phosphorothioate linkage
  modified_base 2: mod_base = OTHER; note = 2'-O-methyluridine with a 3'-phosphorothioate linkage
  modified_base 3: mod_base = gm
  modified_base 4: mod_base = um
  modified_base 5: mod_base = gm
  modified_base 6: mod_base = um
  modified_base 7: mod_base = OTHER; note = 2'-fluoroguanosine
  modified_base 8: mod_base = OTHER; note = 2'-O-methyladenosine
  modified_base 9: mod_base = OTHER; note = 2'-fluorouridine
  modified_base 10: mod_base = OTHER; note = 2'-fluoroguanosine
  modified_base 11: mod_base = OTHER; note = 2'-fluoroadenosine
  modified_base 12: mod_base = OTHER; note = 2'-O-methyladenosine
  modified_base 13: mod_base = gm
  modified_base 14: mod_base = gm
  modified_base 15: mod_base = OTHER; note = 2'-O-methyladenosine
  modified_base 16: mod_base = cm
  modified_base 17: mod_base = OTHER; note = 2'-O-methyladenosine
  modified_base 18: mod_base = um
  modified_base 19: mod_base = OTHER; note = 2'-O-methylguanosine with a 3'-phosphorothioate linkage
  modified_base 20: mod_base = OTHER; note = 2'-O-methylguanosine with a 3'-phosphorothioate linkage
  modified_base 21: mod_base = OTHER; note = 2'-O-methyladenosine
ttgtgtgatgaaggacatgga

SEQ ID NO: 705 - RNA, 23 nt, synthetic construct
  source 1..23: mol_type = other RNA
  modified_base 1: mod_base = OTHER; note = 2'-O-methyluridine with a 3'-phosphorothioate linkage
  modified_base 2: mod_base = OTHER; note = 2'-fluorocytidine with a 3'-phosphorothioate linkage
  modified_base 3: mod_base = cm
  modified_base 4: mod_base = OTHER; note = 2'-O-methyladenosine
  modified_base 5: mod_base = um
  modified_base 6: mod_base = OTHER; note = 2'-fluoroguanosine
  modified_base 7: mod_base = um
  modified_base 8: mod_base = cm
  modified_base 9: mod_base = cm
  modified_base 10: mod_base = um
  modified_base 11: mod_base = um
  modified_base 12: mod_base = cm
  modified_base 13: mod_base = OTHER; note = 2'-O-methyladenosine
  modified_base 14: mod_base = OTHER; note = 2'-fluorouridine
  modified_base 15: mod_base = cm
  modified_base 16: mod_base = OTHER; note = 2'-fluoroadenosine
  modified_base 17: mod_base = cm
  modified_base 18: mod_base = OTHER; note = 2'-O-methyladenosine
  modified_base 19: mod_base = cm
  modified_base 20: mod_base = OTHER; note = 2'-O-methyladenosine
  modified_base 21: mod_base = OTHER; note = 2'-O-methyladenosine with a 3'-phosphorothioate linkage
  modified_base 22: mod_base = OTHER; note = 2'-O-methyluridine with a 3'-phosphorothioate linkage
  modified_base 23: mod_base = cm
tccatgtccttcatcacacaatc

SEQ ID NO: 706 - RNA, 21 nt, synthetic construct
  source 1..21: mol_type = other RNA
  modified_base 1: mod_base = OTHER; note = 2'-O-methyladenosine with a 3'-phosphorothioate linkage
  modified_base 2: mod_base = OTHER; note = 2'-O-methyladenosine with a 3'-phosphorothioate linkage
  modified_base 3: mod_base = OTHER; note = 2'-O-methyladenosine
  modified_base 4: mod_base = gm
  modified_base 5: mod_base = um
  modified_base 6: mod_base = um
  modified_base 7: mod_base = OTHER; note = 2'-fluorocytidine
  modified_base 8: mod_base = OTHER; note = 2'-O-methyladenosine
  modified_base 9: mod_base = OTHER; note = 2'-fluoroadenosine
  modified_base 10: mod_base = OTHER; note = 2'-fluorocytidine
  modified_base 11: mod_base = OTHER; note = 2'-fluorouridine
  modified_base 12: mod_base = gm
  modified_base 13: mod_base = cm
  modified_base 14: mod_base = um
  modified_base 15: mod_base = um
  modified_base 16: mod_base = cm
  modified_base 17: mod_base = gm
  modified_base 18: mod_base = um
  modified_base 19: mod_base = OTHER; note = 2'-O-methyladenosine with a 3'-phosphorothioate linkage
  modified_base 20: mod_base = OTHER; note = 2'-O-methyladenosine with a 3'-phosphorothioate linkage
  modified_base 21: mod_base = OTHER; note = 2'-O-methyladenosine
aaagttcaactgcttcgtaaa

SEQ ID NO: 707 - RNA, 23 nt, synthetic construct
  source 1..23: mol_type = other RNA
  modified_base 1: mod_base = OTHER; note = 2'-O-methyluridine with a 3'-phosphorothioate linkage
  modified_base 2: mod_base = OTHER; note = 2'-fluorouridine with a 3'-phosphorothioate linkage
  modified_base 3: mod_base = um
  modified_base 4: mod_base = OTHER; note = 2'-O-methyladenosine
  modified_base 5: mod_base = cm
  modified_base 6: mod_base = OTHER; note = 2'-fluoroguanosine
  modified_base 7: mod_base = OTHER; note = 2'-O-methyladenosine
  modified_base 8: mod_base = OTHER; note = 2'-O-methyladenosine
  modified_base 9: mod_base = gm
  modified_base 10: mod_base = cm
  modified_base 11: mod_base = OTHER; note = 2'-O-methyladenosine
  modified_base 12: mod_base = gm
  modified_base 13: mod_base = um
  modified_base 14: mod_base = OTHER; note = 2'-fluorouridine
  modified_base 15: mod_base = gm
  modified_base 16: mod_base = OTHER; note = 2'-fluoroadenosine
  modified_base 17: mod_base = OTHER; note = 2'-O-methyladenosine
  modified_base 18: mod_base = cm
  modified_base 19: mod_base = um
  modified_base 20: mod_base = um
  modified_base 21: mod_base = OTHER; note = 2'-O-methyluridine with a 3'-phosphorothioate linkage
  modified_base 22: mod_base = OTHER; note = 2'-O-methylcytidine with a 3'-phosphorothioate linkage
  modified_base 23: mod_base = um
tttacgaagcagttgaactttct

SEQ ID NO: 708 - RNA, 21 nt, synthetic construct
  source 1..21: mol_type = other RNA
  modified_base 1: mod_base = OTHER; note = 2'-O-methyluridine with a 3'-phosphorothioate linkage
  modified_base 2: mod_base = OTHER; note = 2'-O-methylguanosine with a 3'-phosphorothioate linkage
  modified_base 3: mod_base = um
  modified_base 4: mod_base = um
  modified_base 5: mod_base = OTHER; note = 2'-O-methyladenosine
  modified_base 6: mod_base = OTHER; note = 2'-O-methyladenosine
  modified_base 7: mod_base = OTHER; note = 2'-fluorouridine
  modified_base 8: mod_base = gm
  modified_base 9: mod_base = OTHER; note = 2'-fluorocytidine
  modified_base 10: mod_base = OTHER; note = 2'-fluorocytidine
  modified_base 11: mod_base = OTHER; note = 2'-fluorocytidine
  modified_base 12: mod_base = OTHER; note = 2'-O-methyladenosine
  modified_base 13: mod_base = OTHER; note = 2'-O-methyladenosine
  modified_base 14: mod_base = gm
  modified_base 15: mod_base = um
  modified_base 16: mod_base = gm
  modified_base 17: mod_base = OTHER; note = 2'-O-methyladenosine
  modified_base 18: mod_base = cm
  modified_base 19: mod_base = OTHER; note = 2'-O-methyluridine with a 3'-phosphorothioate linkage
  modified_base 20: mod_base = OTHER; note = 2'-O-methylguanosine with a 3'-phosphorothioate linkage
  modified_base 21: mod_base = OTHER; note = 2'-O-methyladenosine
tgttaatgcccaagtgactga

SEQ ID NO: 709 - RNA, 23 nt, synthetic construct
  source 1..23: mol_type = other RNA
  modified_base 1: mod_base = OTHER; note = 2'-O-methyluridine with a 3'-phosphorothioate linkage
  modified_base 2: mod_base = OTHER; note = 2'-fluorocytidine with a 3'-phosphorothioate linkage
  modified_base 3: mod_base = OTHER; note = 2'-O-methyladenosine
  modified_base 4: mod_base = gm
  modified_base 5: mod_base = um
  modified_base 6: mod_base = OTHER; note = 2'-fluorocytidine
  modified_base 7: mod_base = OTHER; note = 2'-O-methyladenosine
  modified_base 8: mod_base = cm
  modified_base 9: mod_base = um
  modified_base 10: mod_base = um
  modified_base 11: mod_base = gm
  modified_base 12: mod_base = gm
  modified_base 13: mod_base = gm
  modified_base 14: mod_base = OTHER; note = 2'-fluorocytidine
  modified_base 15: mod_base = OTHER; note = 2'-O-methyladenosine
  modified_base 16: mod_base = OTHER; note = 2'-fluorouridine
  modified_base 17: mod_base = um
  modified_base 18: mod_base = OTHER; note = 2'-O-methyladenosine
  modified_base 19: mod_base = OTHER; note = 2'-O-methyladenosine
  modified_base 20: mod_base = cm
  modified_base 21: mod_base = OTHER; note = 2'-O-methyladenosine with a 3'-phosphorothioate linkage
  modified_base 22: mod_base = OTHER; note = 2'-O-methylcytidine with a 3'-phosphorothioate linkage
  modified_base 23: mod_base = um
tcagtcacttgggcattaacact

SEQ ID NO: 710 - RNA, 21 nt, synthetic construct
  source 1..21: mol_type = other RNA
  modified_base 1: mod_base = OTHER; note = 2'-O-methylguanosine with a 3'-phosphorothioate linkage
  modified_base 2: mod_base = OTHER; note = 2'-O-methyladenosine with a 3'-phosphorothioate linkage
  modified_base 3: mod_base = um
  modified_base 4: mod_base = gm
  modified_base 5: mod_base = um
  modified_base 6: mod_base = um
  modified_base 7: mod_base = OTHER; note = 2'-fluoroguanosine
  modified_base 8: mod_base = OTHER; note = 2'-O-methyladenosine
  modified_base 9: mod_base = OTHER; note = 2'-fluorocytidine
  modified_base 10: mod_base = OTHER; note = 2'-fluorouridine
  modified_base 11: mod_base = OTHER; note = 2'-fluorouridine
  modified_base 12: mod_base = gm
  modified_base 13: mod_base = OTHER; note = 2'-O-methyladenosine
  modified_base 14: mod_base = gm
  modified_base 15: mod_base = um
  modified_base 16: mod_base = OTHER; note = 2'-O-methyladenosine
  modified_base 17: mod_base = OTHER; note = 2'-O-methyladenosine
  modified_base 18: mod_base = OTHER; note = 2'-O-methyladenosine
  modified_base 19: mod_base = OTHER; note = 2'-O-methyluridine with a 3'-phosphorothioate linkage
  modified_base 20: mod_base = OTHER; note = 2'-O-methyladenosine with a 3'-phosphorothioate linkage
  modified_base 21: mod_base = OTHER; note = 2'-O-methyladenosine
gatgttgacttgagtaaataa

SEQ ID NO: 711 - RNA, 23 nt, synthetic construct
  source 1..23: mol_type = other RNA
  modified_base 1: mod_base = OTHER; note = 2'-O-methyluridine with a 3'-phosphorothioate linkage
  modified_base 2: mod_base = OTHER; note = 2'-fluorouridine with a 3'-phosphorothioate linkage
  modified_base 3: mod_base = OTHER; note = 2'-O-methyladenosine
  modified_base 4: mod_base = um
  modified_base 5: mod_base = um
  modified_base 6: mod_base = OTHER; note = 2'-fluorouridine
  modified_base 7: mod_base = OTHER; note = 2'-O-methyladenosine
  modified_base 8: mod_base = cm
  modified_base 9: mod_base = um
  modified_base 10: mod_base = cm
  modified_base 11: mod_base = OTHER; note = 2'-O-methyladenosine
  modified_base 12: mod_base = OTHER; note = 2'-O-methyladenosine
  modified_base 13: mod_base = gm
  modified_base 14: mod_base = OTHER; note = 2'-fluorouridine
  modified_base 15: mod_base = cm
  modified_base 16: mod_base = OTHER; note = 2'-fluoroadenosine
  modified_base 17: mod_base = OTHER; note = 2'-O-methyladenosine
  modified_base 18: mod_base = cm
  modified_base 19: mod_base = OTHER; note = 2'-O-methyladenosine
  modified_base 20: mod_base = um
  modified_base 21: mod_base = OTHER; note = 2'-O-methylcytidine with a 3'-phosphorothioate linkage
  modified_base 22: mod_base = OTHER; note = 2'-O-methyladenosine with a 3'-phosphorothioate linkage
  modified_base 23: mod_base = gm
ttatttactcaagtcaacatcag

SEQ ID NO: 712 - RNA, 21 nt, synthetic construct
  source 1..21: mol_type = other RNA
  modified_base 1: mod_base = OTHER; note = 2'-O-methylguanosine with a 3'-phosphorothioate linkage
  modified_base 2: mod_base = OTHER; note = 2'-O-methyladenosine with a 3'-phosphorothioate linkage
  modified_base 3: mod_base = OTHER; note = 2'-O-methyladenosine
  modified_base 4: mod_base = gm
  modified_base 5: mod_base = cm
  modified_base 6: mod_base = cm
  modified_base 7: mod_base = OTHER; note = 2'-fluoroadenosine
  modified_base 8: mod_base = OTHER; note = 2'-O-methyladenosine
  modified_base 9: mod_base = OTHER; note = 2'-fluoroadenosine
  modified_base 10: mod_base = OTHER; note = 2'-fluoroadenosine
  modified_base 11: mod_base = OTHER; note = 2'-fluorouridine
  modified_base 12: mod_base = OTHER; note = 2'-O-methyladenosine
  modified_base 13: mod_base = gm
  modified_base 14: mod_base = OTHER; note = 2'-O-methyladenosine
  modified_base 15: mod_base = um
  modified_base 16: mod_base = gm
  modified_base 17: mod_base = OTHER; note = 2'-O-methyladenosine
  modified_base 18: mod_base = gm
  modified_base 19: mod_base = OTHER; note = 2'-O-methyladenosine with a 3'-phosphorothioate linkage
  modified_base 20: mod_base = OTHER; note = 2'-O-methyluridine with a 3'-phosphorothioate linkage
  modified_base 21: mod_base = OTHER; note = 2'-O-methyladenosine
gaagccaaaatagatgagata

SEQ ID NO: 713 - RNA, 23 nt, synthetic construct
  source 1..23: mol_type = other RNA
  modified_base 1: mod_base = OTHER; note = 2'-O-methyluridine with a 3'-phosphorothioate linkage
  modified_base 2: mod_base = OTHER; note = 2'-fluoroadenosine with a 3'-phosphorothioate linkage
  modified_base 3: mod_base = um
  modified_base 4: mod_base = cm
  modified_base 5: mod_base = um
  modified_base 6: mod_base = OTHER; note = 2'-fluorocytidine
  modified_base 7: mod_base = OTHER; note = 2'-O-methyladenosine
  modified_base 8: mod_base = um
  modified_base 9: mod_base = cm
  modified_base 10: mod_base = um
  modified_base 11: mod_base = OTHER; note = 2'-O-methyladenosine
  modified_base 12: mod_base = um
  modified_base 13: mod_base = um
  modified_base 14: mod_base = OTHER; note = 2'-fluorouridine
  modified_base 15: mod_base = um
  modified_base 16: mod_base = OTHER; note = 2'-fluoroguanosine
  modified_base 17: mod_base = gm
  modified_base 18: mod_base = cm
  modified_base 19: mod_base = um
  modified_base 20: mod_base = um
  modified_base 21: mod_base = OTHER; note = 2'-O-methylcytidine with a 3'-phosphorothioate linkage
  modified_base 22: mod_base = OTHER; note = 2'-O-methyladenosine with a 3'-phosphorothioate linkage
  modified_base 23: mod_base = um
tatctcatctattttggcttcat

SEQ ID NO: 714 - RNA, 21 nt, synthetic construct
  source 1..21: mol_type = other RNA
  modified_base 1: mod_base = OTHER; note = 2'-O-methylguanosine with a 3'-phosphorothioate linkage
  modified_base 2: mod_base = OTHER; note = 2'-O-methyluridine with a 3'-phosphorothioate linkage
  modified_base 3: mod_base = um
  modified_base 4: mod_base = cm
  modified_base 5: mod_base = OTHER; note = 2'-O-methyladenosine
  modified_base 6: mod_base = OTHER; note = 2'-O-methyladenosine
  modified_base 7: mod_base = OTHER; note = 2'-fluorocytidine
  modified_base 8: mod_base = um
  modified_base 9: mod_base = OTHER; note = 2'-fluoroguanosine
  modified_base 10: mod_base = OTHER; note = 2'-fluorocytidine
  modified_base 11: mod_base = OTHER; note = 2'-fluorouridine
  modified_base 12: mod_base = um
  modified_base 13: mod_base = cm
  modified_base 14: mod_base = gm
  modified_base 15: mod_base = um
  modified_base 16: mod_base = OTHER; note = 2'-O-methyladenosine
  modified_base 17: mod_base = OTHER; note = 2'-O-methyladenosine
  modified_base 18: mod_base = um
  modified_base 19: mod_base = OTHER; note = 2'-O-methyluridine with a 3'-phosphorothioate linkage
  modified_base 20: mod_base = OTHER; note = 2'-O-methylguanosine with a 3'-phosphorothioate linkage
  modified_base 21: mod_base = OTHER; note = 2'-O-methyladenosine
gttcaactgcttcgtaattga

SEQ ID NO: 715 - RNA, 23 nt, synthetic construct
  source 1..23: mol_type = other RNA
  modified_base 1: mod_base = OTHER; note = 2'-O-methyluridine with a 3'-phosphorothioate linkage
  modified_base 2: mod_base = OTHER; note = 2'-fluorocytidine with a 3'-phosphorothioate linkage
  modified_base 3: mod_base = OTHER; note = 2'-O-methyladenosine
  modified_base 4: mod_base = OTHER; note = 2'-O-methyladenosine
  modified_base 5: mod_base = um
  modified_base 6: mod_base = OTHER; note = 2'-fluorouridine
  modified_base 7: mod_base = OTHER; note = 2'-O-methyladenosine
  modified_base 8: mod_base = cm
  modified_base 9: mod_base = gm
  modified_base 10: mod_base = OTHER; note = 2'-O-methyladenosine
  modified_base 11: mod_base = OTHER; note = 2'-O-methyladenosine
  modified_base 12: mod_base = gm
  modified_base 13: mod_base = cm
  modified_base 14: mod_base = OTHER; note = 2'-fluoroadenosine
  modified_base 15: mod_base = gm
  modified_base 16: mod_base = OTHER; note = 2'-fluorouridine
  modified_base 17: mod_base = um
  modified_base 18: mod_base = gm
  modified_base 19: mod_base = OTHER; note = 2'-O-methyladenosine
  modified_base 20: mod_base = OTHER; note = 2'-O-methyladenosine
  modified_base 21: mod_base = OTHER; note = 2'-O-methylcytidine with a 3'-phosphorothioate linkage
  modified_base 22: mod_base = OTHER; note = 2'-O-methyluridine with a 3'-phosphorothioate linkage
  modified_base 23: mod_base = um
tcaattacgaagcagttgaactt

SEQ ID NO: 716 - RNA, 21 nt, synthetic construct
  source 1..21: mol_type = other RNA
  modified_base 1: mod_base = OTHER; note = 2'-O-methylguanosine with a 3'-phosphorothioate linkage
  modified_base 2: mod_base = OTHER; note = 2'-O-methyluridine with a 3'-phosphorothioate linkage
  modified_base 3: mod_base = OTHER; note = 2'-O-methyladenosine
  modified_base 4: mod_base = cm
  modified_base 5: mod_base = um
  modified_base 6: mod_base = cm
  modified_base 7: mod_base = OTHER; note = 2'-fluorouridine
  modified_base 8: mod_base = um
  modified_base 9: mod_base = OTHER; note = 2'-fluoroguanosine
  modified_base 10: mod_base = OTHER; note = 2'-fluorocytidine
  modified_base 11: mod_base = OTHER; note = 2'-fluoroadenosine
  modified_base 12: mod_base = gm
  modified_base 13: mod_base = OTHER; note = 2'-O-methyladenosine
  modified_base 14: mod_base = gm
  modified_base 15: mod_base = OTHER; note = 2'-O-methyladenosine
  modified_base 16: mod_base = OTHER; note = 2'-O-methyladenosine
  modified_base 17: mod_base = OTHER; note = 2'-O-methyladenosine
  modified_base 18: mod_base = OTHER; note = 2'-O-methyladenosine
  modified_base 19: mod_base = OTHER; note = 2'-O-methyluridine with a 3'-phosphorothioate linkage
  modified_base 20: mod_base = OTHER; note = 2'-O-methyluridine with a 3'-phosphorothioate linkage
  modified_base 21: mod_base = OTHER; note = 2'-O-methyladenosine
gtactcttgcagagaaaatta

SEQ ID NO: 717 - RNA, 23 nt, synthetic construct
  source 1..23: mol_type = other RNA
  modified_base 1: mod_base = OTHER; note = 2'-O-methyluridine with a 3'-phosphorothioate linkage
  modified_base 2: mod_base = OTHER; note = 2'-fluoroadenosine with a 3'-phosphorothioate linkage
  modified_base 3: mod_base = OTHER; note = 2'-O-methyladenosine
  modified_base 4: mod_base = um
  modified_base 5: mod_base = um
  modified_base 6: mod_base = OTHER; note = 2'-fluorouridine
  modified_base 7: mod_base = um
  modified_base 8: mod_base = cm
  modified_base 9: mod_base = um
  modified_base 10: mod_base = cm
  modified_base 11: mod_base = um
  modified_base 12: mod_base = gm
  modified_base 13: mod_base = cm
  modified_base 14: mod_base = OTHER; note = 2'-fluoroadenosine
  modified_base 15: mod_base = OTHER; note = 2'-O-methyladenosine
  modified_base 16: mod_base = OTHER; note = 2'-fluoroguanosine
  modified_base 17: mod_base = OTHER; note = 2'-O-methyladenosine
  modified_base 18: mod_base = gm
  modified_base 19: mod_base = um
  modified_base 20: mod_base = OTHER; note = 2'-O-methyladenosine
  modified_base 21: mod_base = OTHER; note = 2'-O-methylcytidine with a 3'-phosphorothioate linkage
  modified_base 22: mod_base = OTHER; note = 2'-O-methyladenosine with a 3'-phosphorothioate linkage
  modified_base 23: mod_base = OTHER; note = 2'-O-methyladenosine
taattttctctgcaagagtacaa

SEQ ID NO: 718 - RNA, 21 nt, synthetic construct
  source 1..21: mol_type = other RNA
  modified_base 1: mod_base = OTHER; note = 2'-O-methylcytidine with a 3'-phosphorothioate linkage
  modified_base 2: mod_base = OTHER; note = 2'-O-methyluridine with a 3'-phosphorothioate linkage
  modified_base 3: mod_base = cm
  modified_base 4: mod_base = OTHER; note = 2'-O-methyladenosine
  modified_base 5: mod_base = OTHER; note = 2'-O-methyladenosine
  modified_base 6: mod_base = gm
  modified_base 7: mod_base = OTHER; note = 2'-fluoroguanosine
  modified_base 8: mod_base = OTHER; note = 2'-O-methyladenosine
  modified_base 9: mod_base = OTHER; note = 2'-fluorocytidine
  modified_base 10: mod_base = OTHER; note = 2'-fluoroadenosine
  modified_base 11: mod_base = OTHER; note = 2'-fluorouridine
  modified_base 12: mod_base = um
  modified_base 13: mod_base = OTHER; note = 2'-O-methyladenosine
  modified_base 14: mod_base = cm
  modified_base 15: mod_base = um
  modified_base 16: mod_base = OTHER; note = 2'-O-methyladenosine
  modified_base 17: mod_base = gm
  modified_base 18: mod_base = um
  modified_base 19: mod_base = OTHER; note = 2'-O-methylguanosine with a 3'-phosphorothioate linkage
  modified_base 20: mod_base = OTHER; note = 2'-O-methyladenosine with a 3'-phosphorothioate linkage
  modified_base 21: mod_base = OTHER; note = 2'-O-methyladenosine
ctcaaggacattactagtgaa

SEQ ID NO: 719 - RNA, 23 nt, synthetic construct
  source 1..23: mol_type = other RNA
  modified_base 1: mod_base = OTHER; note = 2'-O-methyluridine with a 3'-phosphorothioate linkage
  modified_base 2: mod_base = OTHER; note = 2'-fluorouridine with a 3'-phosphorothioate linkage
  modified_base 3: mod_base = cm
  modified_base 4: mod_base = OTHER; note = 2'-O-methyladenosine
  modified_base 5: mod_base = cm
  modified_base 6: mod_base = OTHER; note = 2'-fluorouridine
  modified_base 7: mod_base = OTHER; note = 2'-O-methyladenosine
  modified_base 8: mod_base = gm
  modified_base 9: mod_base = um
  modified_base 10: mod_base = OTHER; note = 2'-O-methyladenosine
  modified_base 11: mod_base = OTHER; note = 2'-O-methyladenosine
  modified_base 12: mod_base = um
  modified_base 13: mod_base = gm
  modified_base 14: mod_base = OTHER; note = 2'-fluorouridine
  modified_base 15: mod_base = cm
  modified_base 16: mod_base = OTHER; note = 2'-fluorocytidine
  modified_base 17: mod_base = um
  modified_base 18: mod_base = um
  modified_base 19: mod_base = gm
  modified_base 20: mod_base = OTHER; note = 2'-O-methyladenosine
  modified_base 21: mod_base = OTHER; note = 2'-O-methylguanosine with a 3'-phosphorothioate linkage
  modified_base 22: mod_base = OTHER; note = 2'-O-methylguanosine with a 3'-phosphorothioate linkage
  modified_base 23: mod_base = OTHER; note = 2'-O-methyladenosine
ttcactagtaatgtccttgagga

SEQ ID NO: 720 - RNA, 21 nt, synthetic construct
  source 1..21: mol_type = other RNA
  modified_base 1: mod_base = OTHER; note = 2'-O-methyladenosine with a 3'-phosphorothioate linkage
  modified_base 2: mod_base = OTHER; note = 2'-O-methylguanosine with a 3'-phosphorothioate linkage
  modified_base 3: mod_base = gm
  modified_base 4: mod_base = gm
  modified_base 5: mod_base = OTHER; note = 2'-O-methyladenosine
  modified_base 6: mod_base = OTHER; note = 2'-O-methyladenosine
  modified_base 7: mod_base = OTHER; note = 2'-fluoroguanosine
  modified_base 8: mod_base = gm
  modified_base 9: mod_base = OTHER; note = 2'-fluoroadenosine
  modified_base 10: mod_base = OTHER; note = 2'-fluoroguanosine
  modified_base 11: mod_base = OTHER; note = 2'-fluorouridine
  modified_base 12: mod_base = OTHER; note = 2'-O-methyladenosine
  modified_base 13: mod_base = cm
  modified_base 14: mod_base = OTHER; note = 2'-O-methyladenosine
  modified_base 15: mod_base = cm
  modified_base 16: mod_base = OTHER; note = 2'-O-methyladenosine
  modified_base 17: mod_base = gm
  modified_base 18: mod_base = OTHER; note = 2'-O-methyladenosine
  modified_base 19: mod_base = OTHER; note = 2'-O-methylcytidine with a 3'-phosphorothioate linkage
  modified_base 20: mod_base = OTHER; note = 2'-O-methyladenosine with a 3'-phosphorothioate linkage
  modified_base 21: mod_base = OTHER; note = 2'-O-methyladenosine
agggaaggagtacacagacaa

SEQ ID NO: 721 - RNA, 23 nt, synthetic construct
  source 1..23: mol_type = other RNA
  modified_base 1: mod_base = OTHER; note = 2'-O-methyluridine with a 3'-phosphorothioate linkage
  modified_base 2: mod_base = OTHER; note = 2'-fluorouridine with a 3'-phosphorothioate linkage
  modified_base 3: mod_base = gm
  modified_base 4: mod_base = um
  modified_base 5: mod_base = cm
  modified_base 6: mod_base = OTHER; note = 2'-fluorouridine
  modified_base 7: mod_base = gm
  modified_base 8: mod_base = um
  modified_base 9: mod_base = gm
  modified_base 10: mod_base = um
  modified_base 11: mod_base = OTHER; note = 2'-O-methyladenosine
  modified_base 12: mod_base = cm
  modified_base 13: mod_base = um
  modified_base 14: mod_base = OTHER; note = 2'-fluorocytidine
  modified_base 15: mod_base = cm
  modified_base 16: mod_base = OTHER; note = 2'-fluorouridine
  modified_base 17: mod_base = um
  modified_base 18: mod_base = cm
  modified_base 19: mod_base = cm
  modified_base 20: mod_base = cm
  modified_base 21: mod_base = OTHER; note = 2'-O-methyluridine with a 3'-phosphorothioate linkage
  modified_base 22: mod_base = OTHER; note = 2'-O-methyluridine with a 3'-phosphorothioate linkage
  modified_base 23: mod_base = cm
ttgtctgtgtactccttcccttc

SEQ ID NO: 722 - RNA, 21 nt, synthetic construct
  source 1..21: mol_type = other RNA
  modified_base 1: mod_base = OTHER; note = 2'-O-methyluridine with a 3'-phosphorothioate linkage
  modified_base 2: mod_base = OTHER; note = 2'-O-methylcytidine with a 3'-phosphorothioate linkage
  modified_base 3: mod_base = OTHER; note = 2'-O-methyladenosine
  modified_base 4: mod_base = um
  modified_base 5: mod_base = gm
  modified_base 6: mod_base = OTHER; note = 2'-O-methyladenosine
  modified_base 7: mod_base = OTHER; note = 2'-fluorocytidine
  modified_base 8: mod_base = OTHER; note = 2'-O-methyladenosine
  modified_base 9: mod_base = OTHER; note = 2'-fluorocytidine
  modified_base 10: mod_base = OTHER; note = 2'-fluorouridine
  modified_base 11: mod_base = OTHER; note = 2'-fluoroadenosine
  modified_base 12: mod_base = OTHER; note = 2'-O-methyladenosine
  modified_base 13: mod_base = gm
  modified_base 14: mod_base = um
  modified_base 15: mod_base = cm
  modified_base 16: mod_base = OTHER; note = 2'-O-methyladenosine
  modified_base 17: mod_base = OTHER; note = 2'-O-methyladenosine
  modified_base 18: mod_base = gm
  modified_base 19: mod_base = OTHER; note = 2'-O-methyluridine with a 3'-phosphorothioate linkage
  modified_base 20: mod_base = OTHER; note = 2'-O-methyluridine with a 3'-phosphorothioate linkage
  modified_base 21: mod_base = OTHER; note = 2'-O-methyladenosine
tcatgacactaagtcaagtta

SEQ ID NO: 723 - RNA, 23 nt, synthetic construct
  source 1..23: mol_type = other RNA
  modified_base 1: mod_base = OTHER; note = 2'-O-methyluridine with a 3'-phosphorothioate linkage
  modified_base 2: mod_base = OTHER; note = 2'-fluoroadenosine with a 3'-phosphorothioate linkage
  modified_base 3: mod_base = OTHER; note = 2'-O-methyladenosine
  modified_base 4: mod_base = cm
  modified_base 5: mod_base = um
  modified_base 6: mod_base = OTHER; note = 2'-fluorouridine
  modified_base 7: mod_base = gm
  modified_base 8: mod_base = OTHER; note = 2'-O-methyladenosine
  modified_base 9: mod_base = cm
  modified_base 10: mod_base = um
  modified_base 11: mod_base = um
  modified_base 12: mod_base = OTHER; note = 2'-O-methyladenosine
  modified_base 13: mod_base = gm
  modified_base 14: mod_base = OTHER; note = 2'-fluorouridine
  modified_base 15: mod_base = gm
  modified_base 16: mod_base = OTHER; note = 2'-fluorouridine
  modified_base 17: mod_base = cm
  modified_base 18: mod_base = OTHER; note = 2'-O-methyladenosine
  modified_base 19: mod_base = um
  modified_base 20: mod_base = gm
  modified_base 21: mod_base = OTHER; note = 2'-O-methyladenosine with a 3'-phosphorothioate linkage
  modified_base 22: mod_base = OTHER; note = 2'-O-methylcytidine with a 3'-phosphorothioate linkage
  modified_base 23: mod_base = um
taacttgacttagtgtcatgact

SEQ ID NO: 724 - RNA, 21 nt, synthetic construct
  source 1..21: mol_type = other RNA
  modified_base 1: mod_base = OTHER; note = 2'-O-methylcytidine with a 3'-phosphorothioate linkage
  modified_base 2: mod_base = OTHER; note = 2'-O-methylcytidine with a 3'-phosphorothioate linkage
  modified_base 3: mod_base = um
  modified_base 4: mod_base = cm
  modified_base 5: mod_base = OTHER; note = 2'-O-methyladenosine
  modified_base 6: mod_base = OTHER; note = 2'-O-methyladenosine
  modified_base 7: mod_base = OTHER; note = 2'-fluoroguanosine
  modified_base 8: mod_base = gm
  modified_base 9: mod_base = OTHER; note = 2'-fluoroadenosine
  modified_base 10: mod_base = OTHER; note = 2'-fluorocytidine
  modified_base 11: mod_base = OTHER; note = 2'-fluoroadenosine
  modified_base 12: mod_base = um
  modified_base 13: mod_base = um
  modified_base 14: mod_base = OTHER; note = 2'-O-methyladenosine
  modified_base 15: mod_base = cm
  modified_base 16: mod_base = um
  modified_base 17: mod_base = OTHER; note = 2'-O-methyladenosine
  modified_base 18: mod_base = gm
  modified_base 19: mod_base = OTHER; note = 2'-O-methyluridine with a 3'-phosphorothioate linkage
  modified_base 20: mod_base = OTHER; note = 2'-O-methylguanosine with a 3'-phosphorothioate linkage
  modified_base 21: mod_base = OTHER; note = 2'-O-methyladenosine
cctcaaggacattactagtga

SEQ ID NO: 725 - RNA, 23 nt, synthetic construct
  source 1..23: mol_type = other RNA
  modified_base 1: mod_base = OTHER; note = 2'-O-methyluridine with a 3'-phosphorothioate linkage
  modified_base 2: mod_base = OTHER; note = 2'-fluorocytidine with a 3'-phosphorothioate linkage
  modified_base 3: mod_base = OTHER; note = 2'-O-methyladenosine
  modified_base 4: mod_base = cm
  modified_base 5: mod_base = um
  modified_base 6: mod_base = OTHER; note = 2'-fluoroadenosine
  modified_base 7: mod_base = gm
  modified_base 8: mod_base = um
  modified_base 9: mod_base = OTHER; note = 2'-O-methyladenosine
  modified_base 10: mod_base = OTHER; note = 2'-O-methyladenosine
  modified_base 11: mod_base = um
  modified_base 12: mod_base = gm
  modified_base 13: mod_base = um
  modified_base 14: mod_base = OTHER; note = 2'-fluorocytidine
  modified_base 15: mod_base = cm
  modified_base 16: mod_base = OTHER; note = 2'-fluorouridine
  modified_base 17: mod_base = um
  modified_base 18: mod_base = gm
  modified_base 19: mod_base = OTHER; note = 2'-O-methyladenosine
  modified_base 20: mod_base = gm
  modified_base 21: mod_base = OTHER; note = 2'-O-methylguanosine with a 3'-phosphorothioate linkage
  modified_base 22: mod_base = OTHER; note = 2'-O-methyladenosine with a 3'-phosphorothioate linkage
  modified_base 23: mod_base = um
tcactagtaatgtccttgaggat

SEQ ID NO: 726 - RNA, 21 nt, synthetic construct
  source 1..21: mol_type = other RNA
  modified_base 1: mod_base = OTHER; note = 2'-O-methylguanosine with a 3'-phosphorothioate linkage
  modified_base 2: mod_base = OTHER; note = 2'-O-methylguanosine with a 3'-phosphorothioate linkage
  modified_base 3: mod_base = cm
  modified_base 4: mod_base = um
  modified_base 5: mod_base = um
  modified_base 6: mod_base = um
  modified_base 7: mod_base = OTHER; note = 2'-fluoroguanosine
  modified_base 8: mod_base = um
  modified_base 9: mod_base = OTHER; note = 2'-fluorouridine
  modified_base 10: mod_base = OTHER; note = 2'-fluorocytidine
  modified_base 11: mod_base = OTHER; note = 2'-fluoroguanosine
  modified_base 12: mod_base = OTHER; note = 2'-O-methyladenosine
  modified_base 13: mod_base = OTHER; note = 2'-O-methyladenosine
  modified_base 14: mod_base = OTHER; note = 2'-O-methyladenosine
  modified_base 15: mod_base = gm
  modified_base 16: mod_base = OTHER; note = 2'-O-methyladenosine
  modified_base 17: mod_base = OTHER; note = 2'-O-methyladenosine
  modified_base 18: mod_base = um
  modified_base 19: mod_base = OTHER; note = 2'-O-methylguanosine with a 3'-phosphorothioate linkage
  modified_base 20: mod_base = OTHER; note = 2'-O-methylguanosine with a 3'-phosphorothioate linkage
  modified_base 21: mod_base = OTHER; note = 2'-O-methyladenosine
ggctttgttcgaaagaatgga

SEQ ID NO: 727 - RNA, 23 nt, synthetic construct
  source 1..23: mol_type = other RNA
  modified_base 1: mod_base = OTHER; note = 2'-O-methyluridine with a 3'-phosphorothioate linkage
  modified_base 2: mod_base = OTHER; note = 2'-fluorocytidine with a 3'-phosphorothioate linkage
  modified_base 3: mod_base = cm
  modified_base 4: mod_base = OTHER; note = 2'-O-methyladenosine
  modified_base 5: mod_base = um
  modified_base 6: mod_base = OTHER; note = 2'-fluorouridine
  modified_base 7: mod_base = cm
  modified_base 8: mod_base = um
  modified_base 9: mod_base = um
  modified_base 10: mod_base = um
  modified_base 11: mod_base = cm
  modified_base 12: mod_base = gm
  modified_base 13: mod_base = OTHER; note = 2'-O-methyladenosine
  modified_base 14: mod_base = OTHER; note = 2'-fluoroadenosine
  modified_base 15: mod_base = cm
  modified_base 16: mod_base = OTHER; note = 2'-fluoroadenosine
  modified_base 17: mod_base = OTHER; note = 2'-O-methyladenosine
  modified_base 18: mod_base = OTHER; note = 2'-O-methyladenosine
  modified_base 19: mod_base = gm
  modified_base 20: mod_base = cm
  modified_base 21: mod_base = OTHER; note = 2'-O-methylcytidine with a 3'-phosphorothioate linkage
  modified_base 22: mod_base = OTHER; note = 2'-O-methyluridine with a 3'-phosphorothioate linkage
  modified_base 23: mod_base = um
tccattctttcgaacaaagcctt

SEQ ID NO: 728 - RNA, 21 nt, synthetic construct
  source 1..21: mol_type = other RNA
  modified_base 1: mod_base = OTHER; note = 2'-O-methylcytidine with a 3'-phosphorothioate linkage
  modified_base 2: mod_base = OTHER; note = 2'-O-methylcytidine with a 3'-phosphorothioate linkage
  modified_base 3: mod_base = OTHER; note = 2'-O-methyladenosine
  modified_base 4: mod_base = gm
  modified_base 5: mod_base = OTHER; note = 2'-O-methyladenosine
  modified_base 6: mod_base = cm
  modified_base 7: mod_base = OTHER; note = 2'-fluorouridine
  modified_base 8: mod_base = gm
  modified_base 9: mod_base = OTHER; note = 2'-fluorocytidine
  modified_base 10: mod_base = OTHER; note = 2'-fluoroguanosine
  modified_base 11: mod_base = OTHER; note = 2'-fluorouridine
  modified_base 12: mod_base = gm
  modified_base 13: mod_base = cm
  modified_base 14: mod_base = cm
  modified_base 15: mod_base = cm
  modified_base 16: mod_base = um
  modified_base 17: mod_base = gm
  modified_base 18: mod_base = cm
  modified_base 19: mod_base = OTHER; note = 2'-O-methylcytidine with a 3'-phosphorothioate linkage
  modified_base 20: mod_base = OTHER; note = 2'-O-methyladenosine with a 3'-phosphorothioate linkage
  modified_base 21: mod_base = OTHER; note = 2'-O-methyladenosine
ccagactgcgtgccctgccaa

SEQ ID NO: 729 - RNA, 23 nt, synthetic construct
  source 1..23: mol_type = other RNA
  modified_base 1: mod_base = OTHER; note = 2'-O-methyluridine with a 3'-phosphorothioate linkage
  modified_base 2: mod_base = OTHER; note = 2'-fluorouridine with a 3'-phosphorothioate linkage
  modified_base 3: mod_base = gm
  modified_base 4: mod_base = gm
  modified_base 5: mod_base = cm
  modified_base 6: mod_base = OTHER; note = 2'-fluoroadenosine
  modified_base 7: mod_base = gm
  modified_base 8: mod_base = gm
  modified_base 9: mod_base = gm
  modified_base 10: mod_base = cm
  modified_base 11: mod_base = OTHER; note = 2'-O-methyladenosine
  modified_base 12: mod_base = cm
  modified_base 13: mod_base = gm
  modified_base 14: mod_base = OTHER; note = 2'-fluorocytidine
  modified_base 15: mod_base = OTHER; note = 2'-O-methyladenosine
  modified_base 16: mod_base = OTHER; note = 2'-fluoroguanosine
  modified_base 17: mod_base = um
  modified_base 18: mod_base = cm
  modified_base 19: mod_base = um
  modified_base 20: mod_base = gm
  modified_base 21: mod_base = OTHER; note = 2'-O-methylguanosine with a 3'-phosphorothioate linkage
  modified_base 22: mod_base = OTHER; note = 2'-O-methyluridine with a 3'-phosphorothioate linkage
  modified_base 23: mod_base = um
ttggcagggcacgcagtctggtt

SEQ ID NO: 730 - RNA, 21 nt, synthetic construct
  source 1..21: mol_type = other RNA
  modified_base 1: mod_base = OTHER; note = 2'-O-methyladenosine with a 3'-phosphorothioate linkage
  modified_base 2: mod_base = OTHER; note = 2'-O-methylguanosine with a 3'-phosphorothioate linkage
  modified_base 3: mod_base = cm
  modified_base 4: mod_base = cm
  modified_base 5: mod_base = OTHER; note = 2'-O-methyladenosine
  modified_base 6: mod_base = OTHER; note = 2'-O-methyladenosine
  modified_base 7: mod_base = OTHER; note = 2'-fluoroadenosine
  modified_base 8: mod_base = OTHER; note = 2'-O-methyladenosine
  modified_base 9: mod_base = OTHER; note = 2'-fluorouridine
  modified_base 10: mod_base = OTHER; note = 2'-fluoroadenosine
  modified_base 11: mod_base = OTHER; note = 2'-fluoroguanosine
  modified_base 12: mod_base = OTHER; note = 2'-O-methyladenosine
  modified_base 13: mod_base = um
  modified_base 14: mod_base = gm
  modified_base 15: mod_base = OTHER; note = 2'-O-methyladenosine
  modified_base 16: mod_base = gm
  modified_base 17: mod_base = OTHER; note = 2'-O-methyladenosine
  modified_base 18: mod_base = um
  modified_base 19: mod_base = OTHER; note = 2'-O-methylcytidine with a 3'-phosphorothioate linkage
  modified_base 20: mod_base = OTHER; note = 2'-O-methyladenosine with a 3'-phosphorothioate linkage
  modified_base 21: mod_base = OTHER; note = 2'-O-methyladenosine
agccaaaatagatgagatcaa

SEQ ID NO: 731 - RNA, 23 nt, synthetic construct
  source 1..23: mol_type = other RNA
  modified_base 1: mod_base = OTHER; note = 2'-O-methyluridine with a 3'-phosphorothioate linkage
  modified_base 2: mod_base = OTHER; note = 2'-fluorouridine with a 3'-phosphorothioate linkage
  modified_base 3: mod_base = gm
  modified_base 4: mod_base = OTHER; note = 2'-O-methyladenosine
  modified_base 5: mod_base = um
  modified_base 6: mod_base = OTHER; note = 2'-fluorocytidine
  modified_base 7: mod_base = um
  modified_base 8: mod_base = cm
  modified_base 9: mod_base = OTHER; note = 2'-O-methyladenosine
  modified_base 10: mod_base = um
  modified_base 11: mod_base = cm
  modified_base 12: mod_base = um
  modified_base 13: mod_base = OTHER; note = 2'-O-methyladenosine
  modified_base 14: mod_base = OTHER; note = 2'-fluorouridine
  modified_base 15: mod_base = um
  modified_base 16: mod_base = OTHER; note = 2'-fluorouridine
  modified_base 17: mod_base = um
  modified_base 18: mod_base = gm
  modified_base 19: mod_base = gm
  modified_base 20: mod_base = cm
  modified_base 21: mod_base = OTHER; note = 2'-O-methyluridine with a 3'-phosphorothioate linkage
  modified_base 22: mod_base = OTHER; note = 2'-O-methyluridine with a 3'-phosphorothioate linkage
  modified_base 23: mod_base = cm
ttgatctcatctattttggcttc

SEQ ID NO: 732 - RNA, 21 nt, synthetic construct
  source 1..21: mol_type = other RNA
  modified_base 1: mod_base = OTHER; note = 2'-O-methyladenosine with a 3'-phosphorothioate linkage
  modified_base 2: mod_base = OTHER; note = 2'-O-methylguanosine with a 3'-phosphorothioate linkage
  modified_base 3: mod_base = OTHER; note = 2'-O-methyladenosine
  modified_base 4: mod_base = OTHER; note = 2'-O-methyladenosine
  modified_base 5: mod_base = gm
  modified_base 6: mod_base = gm
  modified_base 7: mod_base = OTHER; note = 2'-fluoroguanosine
  modified_base 8: mod_base = OTHER; note = 2'-O-methyladenosine
  modified_base 9: mod_base = OTHER; note = 2'-fluoroadenosine
  modified_base 10: mod_base = OTHER; note = 2'-fluoroguanosine
  modified_base 11: mod_base = OTHER; note = 2'-fluoroguanosine
  modified_base 12: mod_base = OTHER; note = 2'-O-methyladenosine
  modified_base 13: mod_base = gm
  modified_base 14: mod_base = um
  modified_base 15: mod_base = OTHER; note = 2'-O-methyladenosine
  modified_base 16: mod_base = cm
  modified_base 17: mod_base = OTHER; note = 2'-O-methyladenosine
  modified_base 18: mod_base = cm
  modified_base 19: mod_base = OTHER; note = 2'-O-methyladenosine with a 3'-phosphorothioate linkage
  modified_base 20: mod_base = OTHER; note = 2'-O-methylguanosine with a 3'-phosphorothioate linkage
  modified_base 21: mod_base = OTHER; note = 2'-O-methyladenosine
agaagggaaggagtacacaga

SEQ ID NO: 733 - RNA, 23 nt, synthetic construct
  source 1..23: mol_type = other RNA
  modified_base 1: mod_base = OTHER; note = 2'-O-methyluridine with a 3'-phosphorothioate linkage
  modified_base 2: mod_base = OTHER; note = 2'-fluorocytidine with a 3'-phosphorothioate linkage
  modified_base 3: mod_base = um
  modified_base 4: mod_base = gm
  modified_base 5: mod_base = um
  modified_base 6: mod_base = OTHER; note = 2'-fluoroguanosine
  modified_base 7: mod_base = um
  modified_base 8: mod_base = OTHER; note = 2'-O-methyladenosine
  modified_base 9: mod_base = cm
  modified_base 10: mod_base = um
  modified_base 11: mod_base = cm
  modified_base 12: mod_base = cm
  modified_base 13: mod_base = um
  modified_base 14: mod_base = OTHER; note = 2'-fluorouridine
  modified_base 15: mod_base = cm
  modified_base 16: mod_base = OTHER; note = 2'-fluorocytidine
  modified_base 17: mod_base = cm
  modified_base 18: mod_base = um
  modified_base 19: mod_base = um
  modified_base 20: mod_base = cm
  modified_base 21: mod_base = OTHER; note = 2'-O-methyluridine with a 3'-phosphorothioate linkage
  modified_base 22: mod_base = OTHER; note = 2'-O-methyluridine with a 3'-phosphorothioate linkage
  modified_base 23: mod_base = gm
tctgtgtactccttcccttcttg

SEQ ID NO: 734 - RNA, 21 nt, synthetic construct
  source 1..21: mol_type = other RNA
  modified_base 1: mod_base = OTHER; note = 2'-O-methyladenosine with a 3'-phosphorothioate linkage
  modified_base 2: mod_base = OTHER; note = 2'-O-methylguanosine with a 3'-phosphorothioate linkage
  modified_base 3: mod_base = OTHER; note = 2'-O-methyladenosine
  modified_base 4: mod_base = um
  modified_base 5: mod_base = um
  modified_base 6: mod_base = gm
  modified_base 7: mod_base = OTHER; note = 2'-fluorouridine
  modified_base 8: mod_base = gm
  modified_base 9: mod_base = OTHER; note = 2'-fluorouridine
  modified_base 10: mod_base = OTHER; note = 2'-fluoroguanosine
  modified_base 11: mod_base = OTHER; note = 2'-fluoroadenosine
  modified_base 12: mod_base = um
  modified_base 13: mod_base = gm
  modified_base 14: mod_base = OTHER; note = 2'-O-methyladenosine
  modified_base 15: mod_base = OTHER; note = 2'-O-methyladenosine
  modified_base 16: mod_base = gm
  modified_base 17: mod_base = gm
  modified_base 18: mod_base = OTHER; note = 2'-O-methyladenosine
  modified_base 19: mod_base = OTHER; note = 2'-O-methylcytidine with a 3'-phosphorothioate linkage
  modified_base 20: mod_base = OTHER; note = 2'-O-methyladenosine with a 3'-phosphorothioate linkage
  modified_base 21: mod_base = OTHER; note = 2'-O-methyladenosine
agattgtgtgatgaaggacaa

SEQ ID NO: 735 - RNA, 23 nt, synthetic construct
  source 1..23: mol_type = other RNA
  modified_base 1: mod_base = OTHER; note = 2'-O-methyluridine with a 3'-phosphorothioate linkage
  modified_base 2: mod_base = OTHER; note = 2'-fluorouridine with a 3'-phosphorothioate linkage
  modified_base 3: mod_base = gm
  modified_base 4: mod_base = um
  modified_base 5: mod_base = cm
  modified_base 6: mod_base = OTHER; note = 2'-fluorocytidine
  modified_base 7: mod_base = um
  modified_base 8: mod_base = um
  modified_base 9: mod_base = cm
  modified_base 10: mod_base = OTHER; note = 2'-O-methyladenosine
  modified_base 11: mod_base = um
  modified_base 12: mod_base = cm
  modified_base 13: mod_base = OTHER; note = 2'-O-methyladenosine
  modified_base 14: mod_base = OTHER; note = 2'-fluorocytidine
  modified_base 15: mod_base = OTHER; note = 2'-O-methyladenosine
  modified_base 16: mod_base = OTHER; note = 2'-fluorocytidine
  modified_base 17: mod_base = OTHER; note = 2'-O-methyladenosine
  modified_base 18: mod_base = OTHER; note = 2'-O-methyladenosine
  modified_base 19: mod_base = um
  modified_base 20: mod_base = cm
  modified_base 21: mod_base = OTHER; note = 2'-O-methyluridine with a 3'-phosphorothioate linkage
  modified_base 22: mod_base = OTHER; note = 2'-O-methyladenosine with a 3'-phosphorothioate linkage
  modified_base 23: mod_base = cm
ttgtccttcatcacacaatctac

SEQ ID NO: 736 - RNA, 21 nt, synthetic construct
  source 1..21: mol_type = other RNA
  modified_base 1: mod_base = OTHER; note = 2'-O-methyluridine with a 3'-phosphorothioate linkage
  modified_base 2: mod_base = OTHER; note = 2'-O-methyluridine with a 3'-phosphorothioate linkage
  modified_base 3: mod_base = um
  modified_base 4: mod_base = cm
  modified_base 5: mod_base = OTHER; note = 2'-O-methyladenosine
  modified_base 6: mod_base = cm
  modified_base 7: mod_base = OTHER; note = 2'-fluorouridine
  modified_base 8: mod_base = um
  modified_base 9: mod_base = OTHER; note = 2'-fluorocytidine
  modified_base 10: mod_base = OTHER; note = 2'-fluoroguanosine
  modified_base 11: mod_base = OTHER; note = 2'-fluoroguanosine
  modified_base 12: mod_base = OTHER; note = 2'-O-methyladenosine
  modified_base 13: mod_base = gm
  modified_base 14: mod_base = gm
  modified_base 15: mod_base = OTHER; note = 2'-O-methyladenosine
  modified_base 16: mod_base = um
  modified_base 17: mod_base = um
  modified_base 18: mod_base = gm
  modified_base 19: mod_base = OTHER; note = 2'-O-methylcytidine with a 3'-phosphorothioate linkage
  modified_base 20: mod_base = OTHER; note = 2'-O-methyluridine with a 3'-phosphorothioate linkage
  modified_base 21: mod_base = OTHER; note = 2'-O-methyladenosine
tttcacttcggaggattgcta

SEQ ID NO: 737 - RNA, 23 nt, synthetic construct
  source 1..23: mol_type = other RNA
  modified_base 1: mod_base = OTHER; note = 2'-O-methyluridine with a 3'-phosphorothioate linkage
  modified_base 2: mod_base = OTHER; note = 2'-fluoroadenosine with a 3'-phosphorothioate linkage
  modified_base 3: mod_base = gm
  modified_base 4: mod_base = cm
  modified_base 5: mod_base = OTHER; note = 2'-O-methyladenosine
  modified_base 6: mod_base = OTHER; note = 2'-fluoroadenosine
  modified_base 7: mod_base = um
  modified_base 8: mod_base = cm
  modified_base 9: mod_base = cm
  modified_base 10: mod_base = um
  modified_base 11: mod_base = cm
  modified_base 12: mod_base = cm
  modified_base 13: mod_base = gm
  modified_base 14: mod_base = OTHER; note = 2'-fluoroadenosine
  modified_base 15: mod_base = OTHER; note = 2'-O-methyladenosine
  modified_base 16: mod_base = OTHER; note = 2'-fluoroguanosine
  modified_base 17: mod_base = um
  modified_base 18: mod_base = gm
  modified_base 19: mod_base = OTHER; note = 2'-O-methyladenosine
  modified_base 20: mod_base = OTHER; note = 2'-O-methyladenosine
  modified_base 21: mod_base = OTHER; note = 2'-O-methyladenosine with a 3'-phosphorothioate linkage
  modified_base 22: mod_base = OTHER; note = 2'-O-methylguanosine with a 3'-phosphorothioate linkage
  modified_base 23: mod_base = OTHER; note = 2'-O-methyladenosine
tagcaatcctccgaagtgaaaga

SEQ ID NO: 738 - RNA, 21 nt, synthetic construct
  source 1..21: mol_type = other RNA
  modified_base 1: mod_base = OTHER; note = 2'-O-methyladenosine with a 3'-phosphorothioate linkage
  modified_base 2: mod_base = OTHER; note = 2'-O-methyladenosine with a 3'-phosphorothioate linkage
  modified_base 3: mod_base = gm
  modified_base 4: mod_base = gm
  modified_base 5: mod_base = OTHER; note = 2'-O-methyladenosine
  modified_base 6: mod_base = OTHER; note = 2'-O-methyladenosine
  modified_base 7: mod_base = OTHER; note = 2'-fluoroadenosine
  modified_base 8: mod_base = gm
  modified_base 9: mod_base = OTHER; note = 2'-fluorocytidine
  modified_base 10: mod_base = OTHER; note = 2'-fluorouridine
  modified_base 11: mod_base = OTHER; note = 2'-fluoroadenosine
  modified_base 12: mod_base = gm
  modified_base 13: mod_base = gm
  modified_base 14: mod_base = gm
  modified_base 15: mod_base = OTHER; note = 2'-O-methyladenosine
  modified_base 16: mod_base = cm
  modified_base 17: mod_base = um
  modified_base 18: mod_base = gm
  modified_base 19: mod_base = OTHER; note = 2'-O-methylcytidine with a 3'-phosphorothioate linkage
  modified_base 20: mod_base = OTHER; note = 2'-O-methyladenosine with a 3'-phosphorothioate linkage
  modified_base 21: mod_base = OTHER; note = 2'-O-methyladenosine
aaggaaagctagggactgcaa

SEQ ID NO: 739 - RNA, 23 nt, synthetic construct
  source 1..23: mol_type = other RNA
  modified_base 1: mod_base = OTHER; note = 2'-O-methyluridine with a 3'-phosphorothioate linkage
  modified_base 2: mod_base = OTHER; note = 2'-fluorouridine with a 3'-phosphorothioate linkage
  modified_base 3: mod_base = gm
  modified_base 4: mod_base = cm
  modified_base 5: mod_base = OTHER; note = 2'-O-methyladenosine
  modified_base 6: mod_base = OTHER; note = 2'-fluoroguanosine
  modified_base 7: mod_base = um
  modified_base 8: mod_base = cm
  modified_base 9: mod_base = cm
  modified_base 10: mod_base = cm
  modified_base 11: mod_base = um
  modified_base 12: mod_base = OTHER; note = 2'-O-methyladenosine
  modified_base 13: mod_base = gm
  modified_base 14: mod_base = OTHER; note = 2'-fluorocytidine
  modified_base 15: mod_base = um
  modified_base 16: mod_base = OTHER; note = 2'-fluorouridine
  modified_base 17: mod_base = um
  modified_base 18: mod_base = cm
  modified_base 19: mod_base = cm
  modified_base 20: mod_base = um
  modified_base 21: mod_base = OTHER; note = 2'-O-methyluridine with a 3'-phosphorothioate linkage
  modified_base 22: mod_base = OTHER; note = 2'-O-methyluridine with a 3'-phosphorothioate linkage
  modified_base 23: mod_base = cm
ttgcagtccctagctttcctttc

SEQ ID NO: 740 - RNA, 21 nt, synthetic construct
  source 1..21: mol_type = other RNA
  modified_base 1: mod_base = OTHER; note = 2'-O-methylguanosine with a 3'-phosphorothioate linkage
  modified_base 2: mod_base = OTHER; note = 2'-O-methyladenosine with a 3'-phosphorothioate linkage
  modified_base 3: mod_base = cm
  modified_base 4: mod_base = OTHER; note = 2'-O-methyladenosine
  modified_base 5: mod_base = um
  modified_base 6: mod_base = gm
  modified_base 7: mod_base = OTHER; note = 2'-fluoroguanosine
  modified_base 8: mod_base = cm
  modified_base 9: mod_base = OTHER; note = 2'-fluorouridine
  modified_base 10: mod_base = OTHER; note = 2'-fluorouridine
  modified_base 11: mod_base = OTHER; note = 2'-fluoroadenosine
  modified_base 12: mod_base = gm
  modified_base 13: mod_base = OTHER; note = 2'-O-methyladenosine
  modified_base 14: mod_base = OTHER; note = 2'-O-methyladenosine
  modified_base 15: mod_base = gm
  modified_base 16: mod_base = um
  modified_base 17: mod_base = gm
  modified_base 18: mod_base = gm
  modified_base 19: mod_base = OTHER; note = 2'-O-methyladenosine with a 3'-phosphorothioate linkage
  modified_base 20: mod_base = OTHER; note = 2'-O-methyladenosine with a 3'-phosphorothioate linkage
  modified_base 21: mod_base = OTHER; note = 2'-O-methyladenosine
gacatggcttagaagtggaaa

SEQ ID NO: 741 - RNA, 23 nt, synthetic construct
  source 1..23: mol_type = other RNA
  modified_base 1: mod_base = OTHER; note = 2'-O-methyluridine with a 3'-phosphorothioate linkage
  modified_base 2: mod_base = OTHER; note = 2'-fluorouridine with a 3'-phosphorothioate linkage
  modified_base 3: mod_base = um
  modified_base 4: mod_base = cm
  modified_base 5: mod_base = cm
  modified_base 6: mod_base = OTHER; note = 2'-fluoroadenosine
  modified_base 7: mod_base = cm
  modified_base 8: mod_base = um
  modified_base 9: mod_base = um
  modified_base 10: mod_base = cm
  modified_base 11: mod_base = um
  modified_base 12: mod_base = OTHER; note = 2'-O-methyladenosine
  modified_base 13: mod_base = OTHER; note = 2'-O-methyladenosine
  modified_base 14: mod_base = OTHER; note = 2'-fluoroguanosine
  modified_base 15: mod_base = cm
  modified_base 16: mod_base = OTHER; note = 2'-fluorocytidine
  modified_base 17: mod_base = OTHER; note = 2'-O-methyladenosine
  modified_base 18: mod_base = um
  modified_base 19: mod_base = gm
  modified_base 20: mod_base = um
  modified_base 21: mod_base = OTHER; note = 2'-O-methylcytidine with a 3'-phosphorothioate linkage
  modified_base 22: mod_base = OTHER; note = 2'-O-methylcytidine with a 3'-phosphorothioate linkage
  modified_base 23: mod_base = um
tttccacttctaagccatgtcct

SEQ ID NO: 742 - RNA, 21 nt, synthetic construct
  source 1..21: mol_type = other RNA
  modified_base 1: mod_base = OTHER; note = 2'-O-methyluridine with a 3'-phosphorothioate linkage
  modified_base 2: mod_base = OTHER; note = 2'-O-methylguanosine with a 3'-phosphorothioate linkage
  modified_base 3: mod_base = um
  modified_base 4: mod_base = OTHER; note = 2'-O-methyladenosine
  modified_base 5: mod_base = cm
  modified_base 6: mod_base = um
  modified_base 7: mod_base = OTHER; note = 2'-fluorocytidine
  modified_base 8: mod_base = um
  modified_base 9: mod_base = OTHER; note = 2'-fluorouridine
  modified_base 10: mod_base = OTHER; note = 2'-fluoroguanosine
  modified_base 11: mod_base = OTHER; note = 2'-fluorocytidine
  modified_base 12: mod_base = OTHER; note = 2'-O-methyladenosine
  modified_base 13: mod_base = gm
  modified_base 14: mod_base = OTHER; note = 2'-O-methyladenosine
  modified_base 15: mod_base = gm
  modified_base 16: mod_base = OTHER; note = 2'-O-methyladenosine
  modified_base 17: mod_base = OTHER; note = 2'-O-methyladenosine
  modified_base 18: mod_base = OTHER; note = 2'-O-methyladenosine
  modified_base 19: mod_base = OTHER; note = 2'-O-methyladenosine with a 3'-phosphorothioate linkage
  modified_base 20: mod_base = OTHER; note = 2'-O-methyluridine with a 3'-phosphorothioate linkage
  modified_base 21: mod_base = OTHER; note = 2'-O-methyladenosine
tgtactcttgcagagaaaata

SEQ ID NO: 743 - RNA, 23 nt, synthetic construct
  source 1..23: mol_type = other RNA
  modified_base 1: mod_base = OTHER; note = 2'-O-methyluridine with a 3'-phosphorothioate linkage
  modified_base 2: mod_base = OTHER; note = 2'-fluoroadenosine with a 3'-phosphorothioate linkage
  modified_base 3: mod_base = um
  modified_base 4: mod_base = um
  modified_base 5: mod_base = um
  modified_base 6: mod_base = OTHER; note = 2'-fluorouridine
  modified_base 7: mod_base = cm
  modified_base 8: mod_base = um
  modified_base 9: mod_base = cm
  modified_base 10: mod_base = um
  modified_base 11: mod_base = gm
  modified_base 12: mod_base = cm
  modified_base 13: mod_base = OTHER; note = 2'-O-methyladenosine
  modified_base 14: mod_base = OTHER; note = 2'-fluoroadenosine
  modified_base 15: mod_base = gm
  modified_base 16: mod_base = OTHER; note = 2'-fluoroadenosine
  modified_base 17: mod_base = gm
  modified_base 18: mod_base = um
  modified_base 19: mod_base = OTHER; note = 2'-O-methyladenosine
  modified_base 20: mod_base = cm
  modified_base 21: mod_base = OTHER; note = 2'-O-methyladenosine with a 3'-phosphorothioate linkage
  modified_base 22: mod_base = OTHER; note = 2'-O-methyladenosine with a 3'-phosphorothioate linkage
  modified_base 23: mod_base = OTHER; note = 2'-O-methyladenosine
tattttctctgcaagagtacaaa

SEQ ID NO: 744 - RNA, 21 nt, synthetic construct
  source 1..21: mol_type = other RNA
  modified_base 1: mod_base = OTHER; note = 2'-O-methyladenosine with a 3'-phosphorothioate linkage
  modified_base 2: mod_base = OTHER; note = 2'-O-methyluridine with a 3'-phosphorothioate linkage
  modified_base 3: mod_base = gm
  modified_base 4: mod_base = OTHER; note = 2'-O-methyladenosine
  modified_base 5: mod_base = OTHER; note = 2'-O-methyladenosine
  modified_base 6: mod_base = cm
  modified_base 7: mod_base = OTHER; note = 2'-fluorocytidine
  modified_base 8: mod_base = OTHER; note = 2'-O-methyladenosine
  modified_base 9: mod_base = OTHER; note = 2'-fluoroguanosine
  modified_base 10: mod_base = OTHER; note = 2'-fluoroadenosine
  modified_base 11: mod_base = OTHER; note = 2'-fluorocytidine
  modified_base 12: mod_base = um
  modified_base 13: mod_base = gm
  modified_base 14: mod_base = cm
  modified_base 15: mod_base = gm
  modified_base 16: mod_base = um
  modified_base 17: mod_base = gm
  modified_base 18: mod_base = cm
  modified_base 19: mod_base = OTHER; note = 2'-O-methylcytidine with a 3'-phosphorothioate linkage
  modified_base 20: mod_base = OTHER; note = 2'-O-methylcytidine with a 3'-phosphorothioate linkage
  modified_base 21: mod_base = OTHER; note = 2'-O-methyladenosine
atgaaccagactgcgtgccca

SEQ ID NO: 745 - RNA, 23 nt, synthetic construct
  source 1..23: mol_type = other RNA
  modified_base 1: mod_base = OTHER; note = 2'-O-methyluridine with a 3'-phosphorothioate linkage
  modified_base 2: mod_base = OTHER; note = 2'-fluoroguanosine with a 3'-phosphorothioate linkage
  modified_base 3: mod_base = gm
  modified_base 4: mod_base = gm
  modified_base 5: mod_base = cm
  modified_base 6: mod_base = OTHER; note = 2'-fluoroadenosine
  modified_base 7: mod_base = cm
  modified_base 8: mod_base = gm
  modified_base 9: mod_base = cm
  modified_base 10: mod_base = OTHER; note = 2'-O-methyladenosine
  modified_base 11: mod_base = gm
  modified_base 12: mod_base = um
  modified_base 13: mod_base = cm
  modified_base 14: mod_base = OTHER; note = 2'-fluorouridine
  modified_base 15: mod_base = gm
  modified_base 16: mod_base = OTHER; note = 2'-fluoroguanosine
  modified_base 17: mod_base = um
  modified_base 18: mod_base = um
  modified_base 19: mod_base = cm
  modified_base 20: mod_base = OTHER; note = 2'-O-methyladenosine
  modified_base 21: mod_base = OTHER; note = 2'-O-methyluridine with a 3'-phosphorothioate linkage
  modified_base 22: mod_base = OTHER; note = 2'-O-methylcytidine with a 3'-phosphorothioate linkage
  modified_base 23: mod_base = cm
tgggcacgcagtctggttcatcc

SEQ ID NO: 746 - RNA, 21 nt, synthetic construct
  source 1..21: mol_type = other RNA
  modified_base 1: mod_base = OTHER; note = 2'-O-methylcytidine with a 3'-phosphorothioate linkage
  modified_base 2: mod_base = OTHER; note = 2'-O-methyladenosine with a 3'-phosphorothioate linkage
  modified_base 3: mod_base = um
  modified_base 4: mod_base = gm
  modified_base 5: mod_base = OTHER; note = 2'-O-methyladenosine
  modified_base 6: mod_base = cm
  modified_base 7: mod_base = OTHER; note = 2'-fluoroadenosine
  modified_base 8: mod_base = cm
  modified_base 9: mod_base = OTHER; note = 2'-fluorouridine
  modified_base 10: mod_base = OTHER; note = 2'-fluoroadenosine
  modified_base 11: mod_base = OTHER; note = 2'-fluoroadenosine
  modified_base 12: mod_base = gm
  modified_base 13: mod_base = um
  modified_base 14: mod_base = cm
  modified_base 15: mod_base = OTHER; note = 2'-O-methyladenosine
  modified_base 16: mod_base = OTHER; note = 2'-O-methyladenosine
  modified_base 17: mod_base = gm
  modified_base 18: mod_base = um
  modified_base 19: mod_base = OTHER; note = 2'-O-methyluridine with a 3'-phosphorothioate linkage
  modified_base 20: mod_base = OTHER; note = 2'-O-methyladenosine with a 3'-phosphorothioate linkage
  modified_base 21: mod_base = OTHER; note = 2'-O-methyladenosine
catgacactaagtcaagttaa

SEQ ID NO: 747 - RNA, 23 nt, synthetic construct
  source 1..23: mol_type = other RNA
  modified_base 1: mod_base = OTHER; note = 2'-O-methyluridine with a 3'-phosphorothioate linkage
  modified_base 2: mod_base = OTHER; note = 2'-fluorouridine with a 3'-phosphorothioate linkage
  modified_base 3: mod_base = OTHER; note = 2'-O-methyladenosine
  modified_base 4: mod_base = OTHER; note = 2'-O-methyladenosine
  modified_base 5: mod_base = cm
  modified_base 6: mod_base = OTHER; note = 2'-fluorouridine
  modified_base 7: mod_base = um
  modified_base 8: mod_base = gm
  modified_base 9: mod_base = OTHER; note = 2'-O-methyladenosine
  modified_base 10: mod_base = cm
  modified_base 11: mod_base = um
  modified_base 12: mod_base = um
  modified_base 13: mod_base = OTHER; note = 2'-O-methyladenosine
  modified_base 14: mod_base = OTHER; note = 2'-fluoroguanosine
  modified_base 15: mod_base = um
  modified_base 16: mod_base = OTHER; note = 2'-fluoroguanosine
  modified_base 17: mod_base = um
  modified_base 18: mod_base = cm
  modified_base 19: mod_base = OTHER; note = 2'-O-methyladenosine
  modified_base 20: mod_base = um
  modified_base 21: mod_base = OTHER; note = 2'-O-methylguanosine with a 3'-phosphorothioate linkage
  modified_base 22: mod_base = OTHER; note = 2'-O-methyladenosine with a 3'-phosphorothioate linkage
  modified_base 23: mod_base = cm
ttaacttgacttagtgtcatgac

SEQ ID NO: 748 - RNA, 21 nt, synthetic construct
  source 1..21: mol_type = other RNA
  modified_base 1: mod_base = OTHER; note = 2'-O-methyluridine with a 3'-phosphorothioate linkage
  modified_base 2: mod_base = OTHER; note = 2'-O-methyluridine with a 3'-phosphorothioate linkage
  modified_base 3: mod_base = gm
  modified_base 4: mod_base = um
  modified_base 5: mod_base = um
  modified_base 6: mod_base = cm
  modified_base 7: mod_base = OTHER; note = 2'-fluoroguanosine
  modified_base 8: mod_base = OTHER; note = 2'-O-methyladenosine
  modified_base 9: mod_base = OTHER; note = 2'-fluoroadenosine
  modified_base 10: mod_base = OTHER; note = 2'-fluoroadenosine
  modified_base 11: mod_base = OTHER; note = 2'-fluoroguanosine
  modified_base 12: mod_base = OTHER; note = 2'-O-methyladenosine
  modified_base 13: mod_base = OTHER; note = 2'-O-methyladenosine
  modified_base 14: mod_base = um
  modified_base 15: mod_base = gm
  modified_base 16: mod_base = gm
  modified_base 17: mod_base = um
  modified_base 18: mod_base = gm
  modified_base 19: mod_base = OTHER; note = 2'-O-methyluridine with a 3'-phosphorothioate linkage
  modified_base 20: mod_base = OTHER; note = 2'-O-methylcytidine with a 3'-phosphorothioate linkage
  modified_base 21: mod_base = OTHER; note = 2'-O-methyladenosine
ttgttcgaaagaatggtgtca

SEQ ID NO: 749 - RNA, 23 nt, synthetic construct
  source 1..23: mol_type = other RNA
  modified_base 1: mod_base = OTHER; note = 2'-O-methyluridine with a 3'-phosphorothioate linkage
  modified_base 2: mod_base = OTHER; note = 2'-fluoroguanosine with a 3'-phosphorothioate linkage
  modified_base 3: mod_base = OTHER; note = 2'-O-methyladenosine
  modified_base 4: mod_base = cm
  modified_base 5: mod_base = OTHER; note = 2'-O-methyladenosine
  modified_base 6: mod_base = OTHER; note = 2'-fluorocytidine
  modified_base 7: mod_base = cm
  modified_base 8: mod_base = OTHER; note = 2'-O-methyladenosine
  modified_base 9: mod_base = um
  modified_base 10: mod_base = um
  modified_base 11: mod_base = cm
  modified_base 12: mod_base = um
  modified_base 13: mod_base = um
  modified_base 14: mod_base = OTHER; note = 2'-fluorouridine
  modified_base 15: mod_base = cm
  modified_base 16: mod_base = OTHER; note = 2'-fluoroguanosine
  modified_base 17: mod_base = OTHER; note = 2'-O-methyladenosine
  modified_base 18: mod_base = OTHER; note = 2'-O-methyladenosine
  modified_base 19: mod_base = cm
  modified_base 20: mod_base = OTHER; note = 2'-O-methyladenosine
  modified_base 21: mod_base = OTHER; note = 2'-O-methyladenosine with a 3'-phosphorothioate linkage
  modified_base 22: mod_base = OTHER; note = 2'-O-methyladenosine with a 3'-phosphorothioate linkage
  modified_base 23: mod_base = gm
tgacaccattctttcgaacaaag

SEQ ID NO: 750 - RNA, 21 nt, synthetic construct
  source 1..21: mol_type = other RNA
  modified_base 1: mod_base = OTHER; note = 2'-O-methyladenosine with a 3'-phosphorothioate linkage
  modified_base 2: mod_base = OTHER; note = 2'-O-methylcytidine with a 3'-phosphorothioate linkage
  modified_base 3: mod_base = OTHER; note = 2'-O-methyladenosine
  modified_base 4: mod_base = cm
  modified_base 5: mod_base = um
  modified_base 6: mod_base = gm
  modified_base 7: mod_base = OTHER; note = 2'-fluorouridine
  modified_base 8: mod_base = gm
  modified_base 9: mod_base = OTHER; note = 2'-fluoroadenosine
  modified_base 10: mod_base = OTHER; note = 2'-fluorocytidine
  modified_base 11: mod_base = OTHER; note = 2'-fluorocytidine
  modified_base 12: mod_base = cm
  modified_base 13: mod_base = um
  modified_base 14: mod_base = um
  modified_base 15: mod_base = gm
  modified_base 16: mod_base = cm
  modified_base 17: mod_base = OTHER; note = 2'-O-methyladenosine
  modified_base 18: mod_base = cm
  modified_base 19: mod_base = OTHER; note = 2'-O-methylcytidine with a 3'-phosphorothioate linkage
  modified_base 20: mod_base = OTHER; note = 2'-O-methyladenosine with a 3'-phosphorothioate linkage
  modified_base 21: mod_base = OTHER; note = 2'-O-methyladenosine
acactgtgacccttgcaccaa

SEQ ID NO: 751 - RNA, 23 nt, synthetic construct
  source 1..23: mol_type = other RNA
  modified_base 1: mod_base = OTHER; note = 2'-O-methyluridine with a 3'-phosphorothioate linkage
  modified_base 2: mod_base = OTHER; note = 2'-fluorouridine with a 3'-phosphorothioate linkage
  modified_base 3: mod_base = gm
  modified_base 4: mod_base = gm
  modified_base 5: mod_base = um
  modified_base 6: mod_base = OTHER; note = 2'-fluoroguanosine
  modified_base 7: mod_base = cm
  modified_base 8: mod_base = OTHER; note = 2'-O-methyladenosine
  modified_base 9: mod_base = OTHER; note = 2'-O-methyladenosine
  modified_base 10: mod_base = gm
  modified_base 11: mod_base = gm
  modified_base 12: mod_base = gm
  modified_base 13: mod_base = um
  modified_base 14: mod_base = OTHER; note = 2'-fluorocytidine
  modified_base 15: mod_base = OTHER; note = 2'-O-methyladenosine
  modified_base 16: mod_base = OTHER; note = 2'-fluorocytidine
  modified_base 17: mod_base = OTHER; note = 2'-O-methyladenosine
  modified_base 18: mod_base = gm
  modified_base 19: mod_base = um
  modified_base 20: mod_base = gm
  modified_base 21: mod_base = OTHER; note = 2'-O-methyluridine with a 3'-phosphorothioate linkage
  modified_base 22: mod_base = OTHER; note = 2'-O-methyluridine with a 3'-phosphorothioate linkage
  modified_base 23: mod_base = cm
ttggtgcaagggtcacagtgttc

SEQ ID NO: 752 - RNA, 21 nt, synthetic construct
  source 1..21: mol_type = other RNA
  modified_base 1: mod_base = OTHER; note = 2'-O-methylguanosine with a 3'-phosphorothioate linkage
  modified_base 2: mod_base = OTHER; note = 2'-O-methylguanosine with a 3'-phosphorothioate linkage
  modified_base 3: mod_base = OTHER; note = 2'-O-methyladenosine
  modified_base 4: mod_base = OTHER; note = 2'-O-methyladenosine
  modified_base 5: mod_base = OTHER; note = 2'-O-methyladenosine
  modified_base 6: mod_base = um
  modified_base 7: mod_base = OTHER; note = 2'-fluoroadenosine
  modified_base 8: mod_base = OTHER; note = 2'-O-methyladenosine
  modified_base 9: mod_base = OTHER; note = 2'-fluoroadenosine
  modified_base 10: mod_base = OTHER; note = 2'-fluorocytidine
  modified_base 11: mod_base = OTHER; note = 2'-fluorouridine
  modified_base 12: mod_base = gm
  modified_base 13: mod_base = cm
  modified_base 14: mod_base = OTHER; note = 2'-O-methyladenosine
  modified_base 15: mod_base = cm
  modified_base 16: mod_base = cm
  modified_base 17: mod_base = cm
  modified_base 18: mod_base = gm
  modified_base 19: mod_base = OTHER; note = 2'-O-methylguanosine with a 3'-phosphorothioate linkage
  modified_base 20: mod_base = OTHER; note = 2'-O-methyladenosine with a 3'-phosphorothioate linkage
  modified_base 21: mod_base = OTHER; note = 2'-O-methyladenosine
ggaaataaactgcacccggaa

SEQ ID NO: 753 - RNA, 23 nt, synthetic construct
  source 1..23: mol_type = other RNA
  modified_base 1: mod_base = OTHER; note = 2'-O-methyluridine with a 3'-phosphorothioate linkage
  modified_base 2: mod_base = OTHER; note = 2'-fluorouridine with a 3'-phosphorothioate linkage
  modified_base 3: mod_base = cm
  modified_base 4: mod_base = cm
  modified_base 5: mod_base = gm
  modified_base 6: mod_base = OTHER; note = 2'-fluoroguanosine
  modified_base 7: mod_base = gm
  modified_base 8: mod_base = um
  modified_base 9: mod_base = gm
  modified_base 10: mod_base = cm
  modified_base 11: mod_base = OTHER; note = 2'-O-methyladenosine
  modified_base 12: mod_base = gm
  modified_base 13: mod_base = um
  modified_base 14: mod_base = OTHER; note = 2'-fluorouridine
  modified_base 15: mod_base = um
  modified_base 16: mod_base = OTHER; note = 2'-fluoroadenosine
  modified_base 17: mod_base = um
  modified_base 18: mod_base = um
  modified_base 19: mod_base = um
  modified_base 20: mod_base = cm
  modified_base 21: mod_base = OTHER; note = 2'-O-methylcytidine with a 3'-phosphorothioate linkage
  modified_base 22: mod_base = OTHER; note = 2'-O-methyladenosine with a 3'-phosphorothioate linkage
  modified_base 23: mod_base = cm
ttccgggtgcagtttatttccac

SEQ ID NO: 754 - RNA, 21 nt, synthetic construct
  source 1..21: mol_type = other RNA
  modified_base 1: mod_base = OTHER; note = 2'-O-methyladenosine with a 3'-phosphorothioate linkage
  modified_base 2: mod_base = OTHER; note = 2'-O-methyladenosine with a 3'-phosphorothioate linkage
  modified_base 3: mod_base = gm
  modified_base 4: mod_base = um
  modified_base 5: mod_base = gm
  modified_base 6: mod_base = um
  modified_base 7: mod_base = OTHER; note = 2'-fluorouridine
  modified_base 8: mod_base = OTHER; note = 2'-O-methyladenosine
  modified_base 9: mod_base = OTHER; note = 2'-fluoroadenosine
  modified_base 10: mod_base = OTHER; note = 2'-fluorouridine
  modified_base 11: mod_base = OTHER; note = 2'-fluoroguanosine
  modified_base 12: mod_base = cm
  modified_base 13: mod_base = cm
  modified_base 14: mod_base = cm
  modified_base 15: mod_base = OTHER; note = 2'-O-methyladenosine
  modified_base 16: mod_base = OTHER; note = 2'-O-methyladenosine
  modified_base 17: mod_base = gm
  modified_base 18: mod_base = um
  modified_base 19: mod_base = OTHER; note = 2'-O-methylguanosine with a 3'-phosphorothioate linkage
  modified_base 20: mod_base = OTHER; note = 2'-O-methyladenosine with a 3'-phosphorothioate linkage
  modified_base 21: mod_base = OTHER; note = 2'-O-methyladenosine
aagtgttaatgcccaagtgaa

SEQ ID NO: 755 - RNA, 23 nt, synthetic construct
  source 1..23: mol_type = other RNA
  modified_base 1: mod_base = OTHER; note = 2'-O-methyluridine with a 3'-phosphorothioate linkage
  modified_base 2: mod_base = OTHER; note = 2'-fluorouridine with a 3'-phosphorothioate linkage
  modified_base 3: mod_base = cm
  modified_base 4: mod_base = OTHER; note = 2'-O-methyladenosine
  modified_base 5: mod_base = cm
  modified_base 6: mod_base = OTHER; note = 2'-fluorouridine
  modified_base 7: mod_base = um
  modified_base 8: mod_base = gm
  modified_base 9: mod_base = gm
  modified_base 10: mod_base = gm
  modified_base 11: mod_base = cm
  modified_base 12: mod_base = OTHER; note = 2'-O-methyladenosine
  modified_base 13: mod_base = um
  modified_base 14: mod_base = OTHER; note = 2'-fluorouridine
  modified_base 15: mod_base = OTHER; note = 2'-O-methyladenosine
  modified_base 16: mod_base = OTHER; note = 2'-fluoroadenosine
  modified_base 17: mod_base = cm
  modified_base 18: mod_base = OTHER; note = 2'-O-methyladenosine
  modified_base 19: mod_base = cm
  modified_base 20: mod_base = um
  modified_base 21: mod_base = OTHER; note = 2'-O-methyluridine with a 3'-phosphorothioate linkage
  modified_base 22: mod_base = OTHER; note = 2'-O-methyluridine with a 3'-phosphorothioate linkage
  modified_base 23: mod_base = um
ttcacttgggcattaacactttt

SEQ ID NO: 756 - RNA, 21 nt, synthetic construct
  source 1..21: mol_type = other RNA
  modified_base 1: mod_base = OTHER; note = 2'-O-methyladenosine with a 3'-phosphorothioate linkage
  modified_base 2: mod_base = OTHER; note = 2'-O-methylguanosine with a 3'-phosphorothioate linkage
  modified_base 3: mod_base = um
  modified_base 4: mod_base = um
  modified_base 5: mod_base = cm
  modified_base 6: mod_base = OTHER; note = 2'-O-methyladenosine
  modified_base 7: mod_base = OTHER; note = 2'-fluoroadenosine
  modified_base 8: mod_base = cm
  modified_base 9: mod_base = OTHER; note = 2'-fluorouridine
  modified_base 10: mod_base = OTHER; note = 2'-fluoroguanosine
  modified_base 11: mod_base = OTHER; note = 2'-fluorocytidine
  modified_base 12: mod_base = um
  modified_base 13: mod_base = um
  modified_base 14: mod_base = cm
  modified_base 15: mod_base = gm
  modified_base 16: mod_base = um
  modified_base 17: mod_base = OTHER; note = 2'-O-methyladenosine
  modified_base 18: mod_base = OTHER; note = 2'-O-methyladenosine
  modified_base 19: mod_base = OTHER; note = 2'-O-methyluridine with a 3'-phosphorothioate linkage
  modified_base 20: mod_base = OTHER; note = 2'-O-methyluridine with a 3'-phosphorothioate linkage
  modified_base 21: mod_base = OTHER; note = 2'-O-methyladenosine
agttcaactgcttcgtaatta

SEQ ID NO: 757 - RNA, 23 nt, synthetic construct
  source 1..23: mol_type = other RNA
  modified_base 1: mod_base = OTHER; note = 2'-O-methyluridine with a 3'-phosphorothioate linkage
  modified_base 2: mod_base = OTHER; note = 2'-fluoroadenosine with a 3'-phosphorothioate linkage
  modified_base 3: mod_base = OTHER; note = 2'-O-methyladenosine
  modified_base 4: mod_base = um
  modified_base 5: mod_base = um
  modified_base 6: mod_base = OTHER; note = 2'-fluoroadenosine
  modified_base 7: mod_base = cm
  modified_base 8: mod_base = gm
  modified_base 9: mod_base = OTHER; note = 2'-O-methyladenosine
  modified_base 10: mod_base = OTHER; note = 2'-O-methyladenosine
  modified_base 11: mod_base = gm
  modified_base 12: mod_base = cm
  modified_base 13: mod_base = OTHER; note = 2'-O-methyladenosine
  modified_base 14: mod_base = OTHER; note = 2'-fluoroguanosine
  modified_base 15: mod_base = um
  modified_base 16: mod_base = OTHER; note = 2'-fluorouridine
  modified_base 17: mod_base = gm
  modified_base 18: mod_base = OTHER; note = 2'-O-methyladenosine
  modified_base 19: mod_base = OTHER; note = 2'-O-methyladenosine
  modified_base 20: mod_base = cm
  modified_base 21: mod_base = OTHER; note = 2'-O-methyluridine with a 3'-phosphorothioate linkage
  modified_base 22: mod_base = OTHER; note = 2'-O-methyluridine with a 3'-phosphorothioate linkage
  modified_base 23: mod_base = um
taattacgaagcagttgaacttt

SEQ ID NO: 758 - RNA, 21 nt, synthetic construct
  source 1..21: mol_type = other RNA
  modified_base 1: mod_base = OTHER; note = 2'-O-methylcytidine with a 3'-phosphorothioate linkage
  modified_base 2: mod_base = OTHER; note = 2'-O-methyladenosine with a 3'-phosphorothioate linkage
  modified_base 3: mod_base = cm
  modified_base 4: mod_base = um
  modified_base 5: mod_base = um
  modified_base 6: mod_base = cm
  modified_base 7: mod_base = OTHER; note = 2'-fluoroguanosine
  modified_base 8: mod_base = gm
  modified_base 9: mod_base = OTHER; note = 2'-fluoroadenosine
  modified_base 10: mod_base = OTHER; note = 2'-fluoroguanosine
  modified_base 11: mod_base = OTHER; note = 2'-fluoroguanosine
  modified_base 12: mod_base = OTHER; note = 2'-O-methyladenosine
  modified_base 13: mod_base = um
  modified_base 14: mod_base = um
  modified_base 15: mod_base = gm
  modified_base 16: mod_base = cm
  modified_base 17: mod_base = um
  modified_base 18: mod_base = cm
  modified_base 19: mod_base = OTHER; note = 2'-O-methyladenosine with a 3'-phosphorothioate linkage
  modified_base 20: mod_base = OTHER; note = 2'-O-methyladenosine with a 3'-phosphorothioate linkage
  modified_base 21: mod_base = OTHER; note = 2'-O-methyladenosine
cacttcggaggattgctcaaa

SEQ ID NO: 759 - RNA, 23 nt, synthetic construct
  source 1..23: mol_type = other RNA
  modified_base 1: mod_base = OTHER; note = 2'-O-methyluridine with a 3'-phosphorothioate linkage
  modified_base 2: mod_base = OTHER; note = 2'-fluorouridine with a 3'-phosphorothioate linkage
  modified_base 3: mod_base = um
  modified_base 4: mod_base = gm
  modified_base 5: mod_base = OTHER; note = 2'-O-methyladenosine
  modified_base 6: mod_base = OTHER; note = 2'-fluoroguanosine
  modified_base 7: mod_base = cm
  modified_base 8: mod_base = OTHER; note = 2'-O-methyladenosine
  modified_base 9: mod_base = OTHER; note = 2'-O-methyladenosine
  modified_base 10: mod_base = um
  modified_base 11: mod_base = cm
  modified_base 12: mod_base = cm
  modified_base 13: mod_base = um
  modified_base 14: mod_base = OTHER; note = 2'-fluorocytidine
  modified_base 15: mod_base = cm
  modified_base 16: mod_base = OTHER; note = 2'-fluoroguanosine
  modified_base 17: mod_base = OTHER; note = 2'-O-methyladenosine
  modified_base 18: mod_base = OTHER; note = 2'-O-methyladenosine
  modified_base 19: mod_base = gm
  modified_base 20: mod_base = um
  modified_base 21: mod_base = OTHER; note = 2'-O-methylguanosine with a 3'-phosphorothioate linkage
  modified_base 22: mod_base = OTHER; note = 2'-O-methyladenosine with a 3'-phosphorothioate linkage
  modified_base 23: mod_base = OTHER; note = 2'-O-methyladenosine
tttgagcaatcctccgaagtgaa

SEQ ID NO: 760 - RNA, 21 nt, synthetic construct
  source 1..21: mol_type = other RNA
  modified_base 1: mod_base = OTHER; note = 2'-O-methyladenosine with a 3'-phosphorothioate linkage
  modified_base 2: mod_base = OTHER; note = 2'-O-methyluridine with a 3'-phosphorothioate linkage
  modified_base 3: mod_base = gm
  modified_base 4: mod_base = OTHER; note = 2'-O-methyladenosine
  modified_base 5: mod_base = OTHER; note = 2'-O-methyladenosine
  modified_base 6: mod_base = gm
  modified_base 7: mod_base = OTHER; note = 2'-fluorocytidine
  modified_base 8: mod_base = cm
  modified_base 9: mod_base = OTHER; note = 2'-fluoroadenosine
  modified_base 10: mod_base = OTHER; note = 2'-fluoroadenosine
  modified_base 11: mod_base = OTHER; note = 2'-fluoroadenosine
  modified_base 12: mod_base = OTHER; note = 2'-O-methyladenosine
  modified_base 13: mod_base = um
  modified_base 14: mod_base = OTHER; note = 2'-O-methyladenosine
  modified_base 15: mod_base = gm
  modified_base 16: mod_base = OTHER; note = 2'-O-methyladenosine
  modified_base 17: mod_base = um
  modified_base 18: mod_base = gm
  modified_base 19: mod_base = OTHER; note = 2'-O-methyladenosine with a 3'-phosphorothioate linkage
  modified_base 20: mod_base = OTHER; note = 2'-O-methylguanosine with a 3'-phosphorothioate linkage
  modified_base 21: mod_base = OTHER; note = 2'-O-methyladenosine
atgaagccaaaatagatgaga

SEQ ID NO: 761 - RNA, 23 nt, synthetic construct
  source 1..23: mol_type = other RNA
  modified_base 1: mod_base = OTHER; note = 2'-O-methyluridine with a 3'-phosphorothioate linkage
  modified_base 2: mod_base = OTHER; note = 2'-fluorocytidine with a 3'-phosphorothioate linkage
  modified_base 3: mod_base = um
  modified_base 4: mod_base = cm
  modified_base 5: mod_base = OTHER; note = 2'-O-methyladenosine
  modified_base 6: mod_base = OTHER; note = 2'-fluorouridine
  modified_base 7: mod_base = cm
  modified_base 8: mod_base = um
  modified_base 9: mod_base = OTHER; note = 2'-O-methyladenosine
  modified_base 10: mod_base = um
  modified_base 11: mod_base = um
  modified_base 12: mod_base = um
  modified_base 13: mod_base = um
  modified_base 14: mod_base = OTHER; note = 2'-fluoroguanosine
  modified_base 15: mod_base = gm
  modified_base 16: mod_base = OTHER; note = 2'-fluorocytidine
  modified_base 17: mod_base = um
  modified_base 18: mod_base = um
  modified_base 19: mod_base = cm
  modified_base 20: mod_base = OTHER; note = 2'-O-methyladenosine
  modified_base 21: mod_base = OTHER; note = 2'-O-methyluridine with a 3'-phosphorothioate linkage
  modified_base 22: mod_base = OTHER; note = 2'-O-methyluridine with a 3'-phosphorothioate linkage
  modified_base 23: mod_base = gm
tctcatctattttggcttcattg

SEQ ID NO: 762 - RNA, 21 nt, synthetic construct
  source 1..21: mol_type = other RNA
  modified_base 1: mod_base = OTHER; note = 2'-O-methyladenosine with a 3'-phosphorothioate linkage
  modified_base 2: mod_base = OTHER; note = 2'-O-methylcytidine with a 3'-phosphorothioate linkage
  modified_base 3: mod_base = um
  modified_base 4: mod_base = um
  modified_base 5: mod_base = cm
  modified_base 6: mod_base = gm
  modified_base 7: mod_base = OTHER; note = 2'-fluoroguanosine
  modified_base 8: mod_base = OTHER; note = 2'-O-methyladenosine
  modified_base 9: mod_base = OTHER; note = 2'-fluoroguanosine
  modified_base 10: mod_base = OTHER; note = 2'-fluoroguanosine
  modified_base 11: mod_base = OTHER; note = 2'-fluoroadenosine
  modified_base 12: mod_base = um
  modified_base 13: mod_base = um
  modified_base 14: mod_base = gm
  modified_base 15: mod_base = cm
  modified_base 16: mod_base = um
  modified_base 17: mod_base = cm
  modified_base 18: mod_base = OTHER; note = 2'-O-methyladenosine
  modified_base 19: mod_base = OTHER; note = 2'-O-methyladenosine with a 3'-phosphorothioate linkage
  modified_base 20: mod_base = OTHER; note = 2'-O-methylcytidine with a 3'-phosphorothioate linkage
  modified_base 21: mod_base = OTHER; note = 2'-O-methyladenosine
acttcggaggattgctcaaca

SEQ ID NO: 763 - RNA, 23 nt, synthetic construct
  source 1..23: mol_type = other RNA
  modified_base 1: mod_base = OTHER; note = 2'-O-methyluridine with a 3'-phosphorothioate linkage
  modified_base 2: mod_base = OTHER; note = 2'-fluoroguanosine with a 3'-phosphorothioate linkage
  modified_base 3: mod_base = um
  modified_base 4: mod_base = um
  modified_base 5: mod_base = gm
  modified_base 6: mod_base = OTHER; note = 2'-fluoroadenosine
  modified_base 7: mod_base = gm
  modified_base 8: mod_base = cm
  modified_base 9: mod_base = OTHER; note = 2'-O-methyladenosine
  modified_base 10: mod_base = OTHER; note = 2'-O-methyladenosine
  modified_base 11: mod_base = um
  modified_base 12: mod_base = cm
  modified_base 13: mod_base = cm
  modified_base 14: mod_base = OTHER; note = 2'-fluorouridine
  modified_base 15: mod_base = cm
  modified_base 16: mod_base = OTHER; note = 2'-fluorocytidine
  modified_base 17: mod_base = gm
  modified_base 18: mod_base = OTHER; note = 2'-O-methyladenosine
  modified_base 19: mod_base = OTHER; note = 2'-O-methyladenosine
  modified_base 20: mod_base = gm
  modified_base 21: mod_base = OTHER; note = 2'-O-methyluridine with a 3'-phosphorothioate linkage
  modified_base 22: mod_base = OTHER; note = 2'-O-methylguanosine with a 3'-phosphorothioate linkage
  modified_base 23: mod_base = OTHER; note = 2'-O-methyladenosine
tgttgagcaatcctccgaagtga

SEQ ID NO: 764 - RNA, 21 nt, synthetic construct
  source 1..21: mol_type = other RNA
  modified_base 1: mod_base = OTHER; note = 2'-O-methyladenosine with a 3'-phosphorothioate linkage
  modified_base 2: mod_base = OTHER; note = 2'-O-methylguanosine with a 3'-phosphorothioate linkage
  modified_base 3: mod_base = gm
  modified_base 4: mod_base = um
  modified_base 5: mod_base = gm
  modified_base 6: mod_base = OTHER; note = 2'-O-methyladenosine
  modified_base 7: mod_base = OTHER; note = 2'-fluoroadenosine
  modified_base 8: mod_base = OTHER; note = 2'-O-methyladenosine
  modified_base 9: mod_base = OTHER; note = 2'-fluoroguanosine
  modified_base 10: mod_base = OTHER; note = 2'-fluoroguanosine
  modified_base 11: mod_base = OTHER; note = 2'-fluoroadenosine
  modified_base 12: mod_base = OTHER; note = 2'-O-methyladenosine
  modified_base 13: mod_base = OTHER; note = 2'-O-methyladenosine
  modified_base 14: mod_base = gm
  modified_base 15: mod_base = cm
  modified_base 16: mod_base = um
  modified_base 17: mod_base = OTHER; note = 2'-O-methyladenosine
  modified_base 18: mod_base = gm
  modified_base 19: mod_base = OTHER; note = 2'-O-methylguanosine with a 3'-phosphorothioate linkage
  modified_base 20: mod_base = OTHER; note = 2'-O-methylguanosine with a 3'-phosphorothioate linkage
  modified_base 21: mod_base = OTHER; note = 2'-O-methyladenosine
aggtgaaaggaaagctaggga

SEQ ID NO: 765 - RNA, 23 nt, synthetic construct
  source 1..23: mol_type = other RNA
  modified_base 1: mod_base = OTHER; note = 2'-O-methyluridine with a 3'-phosphorothioate linkage
  modified_base 2: mod_base = OTHER; note = 2'-fluorocytidine with a 3'-phosphorothioate linkage
  modified_base 3: mod_base = cm
  modified_base 4: mod_base = cm
  modified_base 5: mod_base = um
  modified_base 6: mod_base = OTHER; note = 2'-fluoroadenosine
  modified_base 7: mod_base = gm
  modified_base 8: mod_base = cm
  modified_base 9: mod_base = um
  modified_base 10: mod_base = um
  modified_base 11: mod_base = um
  modified_base 12: mod_base = cm
  modified_base 13: mod_base = cm
  modified_base 14: mod_base = OTHER; note = 2'-fluorouridine
  modified_base 15: mod_base = um
  modified_base 16: mod_base = OTHER; note = 2'-fluorouridine
  modified_base 17: mod_base = cm
  modified_base 18: mod_base = OTHER; note = 2'-O-methyladenosine
  modified_base 19: mod_base = cm
  modified_base 20: mod_base = cm
  modified_base 21: mod_base = OTHER; note = 2'-O-methyluridine with a 3'-phosphorothioate linkage
  modified_base 22: mod_base = OTHER; note = 2'-O-methylguanosine with a 3'-phosphorothioate linkage
  modified_base 23: mod_base = gm
tccctagctttcctttcacctgg

SEQ ID NO: 766 - RNA, 21 nt, synthetic construct
  source 1..21: mol_type = other RNA
  modified_base 1: mod_base = OTHER; note = 2'-O-methyladenosine with a 3'-phosphorothioate linkage
  modified_base 2: mod_base = OTHER; note = 2'-O-methyladenosine with a 3'-phosphorothioate linkage
  modified_base 3: mod_base = gm
  modified_base 4: mod_base = gm
  modified_base 5: mod_base = gm
  modified_base 6: mod_base = OTHER; note = 2'-O-methyladenosine
  modified_base 7: mod_base = OTHER; note = 2'-fluoroadenosine
  modified_base 8: mod_base = gm
  modified_base 9: mod_base = OTHER; note = 2'-fluoroguanosine
  modified_base 10: mod_base = OTHER; note = 2'-fluoroadenosine
  modified_base 11: mod_base = OTHER; note = 2'-fluoroguanosine
  modified_base 12: mod_base = um
  modified_base 13: mod_base = OTHER; note = 2'-O-methyladenosine
  modified_base 14: mod_base = cm
  modified_base 15: mod_base = OTHER; note = 2'-O-methyladenosine
  modified_base 16: mod_base = cm
  modified_base 17: mod_base = OTHER; note = 2'-O-methyladenosine
  modified_base 18: mod_base = gm
  modified_base 19: mod_base = OTHER; note = 2'-O-methyladenosine with a 3'-phosphorothioate linkage
  modified_base 20: mod_base = OTHER; note = 2'-O-methylcytidine with a 3'-phosphorothioate linkage
  modified_base 21: mod_base = OTHER; note = 2'-O-methyladenosine
aagggaaggagtacacagaca

SEQ ID NO: 767 - RNA, 23 nt, synthetic construct
  source 1..23: mol_type = other RNA
  modified_base 1: mod_base = OTHER; note = 2'-O-methyluridine with a 3'-phosphorothioate linkage
  modified_base 2: mod_base = OTHER; note = 2'-fluoroguanosine with a 3'-phosphorothioate linkage
  modified_base 3: mod_base = um
  modified_base 4: mod_base = cm
  modified_base 5: mod_base = um
  modified_base 6: mod_base = OTHER; note = 2'-fluoroguanosine
  modified_base 7: mod_base = um
  modified_base 8: mod_base = gm
  modified_base 9: mod_base = um
  modified_base 10: mod_base = OTHER; note = 2'-O-methyladenosine
  modified_base 11: mod_base = cm
  modified_base 12: mod_base = um
  modified_base 13: mod_base = cm
  modified_base 14: mod_base = OTHER; note = 2'-fluorocytidine
  modified_base 15: mod_base = um
  modified_base 16: mod_base = OTHER; note = 2'-fluorouridine
  modified_base 17: mod_base = cm
  modified_base 18: mod_base = cm
  modified_base 19: mod_base = cm
  modified_base 20: mod_base = um
  modified_base 21: mod_base = OTHER; note = 2'-O-methyluridine with a 3'-phosphorothioate linkage
  modified_base 22: mod_base = OTHER; note = 2'-O-methylcytidine with a 3'-phosphorothioate linkage
  modified_base 23: mod_base = um
tgtctgtgtactccttcccttct

SEQ ID NO: 768 - RNA, 21 nt, synthetic construct
  source 1..21: mol_type = other RNA
  modified_base 1: mod_base = OTHER; note = 2'-O-methyladenosine with a 3'-phosphorothioate linkage
  modified_base 2: mod_base = OTHER; note = 2'-O-methylguanosine with a 3'-phosphorothioate linkage
  modified_base 3: mod_base = um
  modified_base 4: mod_base = gm
  modified_base 5: mod_base = gm
  modified_base 6: mod_base = OTHER; note = 2'-O-methyladenosine
  modified_base 7: mod_base = OTHER; note = 2'-fluoroadenosine
  modified_base 8: mod_base = OTHER; note = 2'-O-methyladenosine
  modified_base 9: mod_base = OTHER; note = 2'-fluorouridine
  modified_base 10: mod_base = OTHER; note = 2'-fluoroadenosine
  modified_base 11: mod_base = OTHER; note = 2'-fluoroadenosine
  modified_base 12: mod_base = OTHER; note = 2'-O-methyladenosine
  modified_base 13: mod_base = cm
  modified_base 14: mod_base = um
  modified_base 15: mod_base = gm
  modified_base 16: mod_base = cm
  modified_base 17: mod_base = OTHER; note = 2'-O-methyladenosine
  modified_base 18: mod_base = cm
  modified_base 19: mod_base = OTHER; note = 2'-O-methylcytidine with a 3'-phosphorothioate linkage
  modified_base 20: mod_base = OTHER; note = 2'-O-methylcytidine with a 3'-phosphorothioate linkage
  modified_base 21: mod_base = OTHER; note = 2'-O-methyladenosine
agtggaaataaactgcaccca

SEQ ID NO: 769 - RNA, 23 nt, synthetic construct
  source 1..23: mol_type = other RNA
  modified_base 1: mod_base = OTHER; note = 2'-O-methyluridine with a 3'-phosphorothioate linkage
  modified_base 2: mod_base = OTHER; note = 2'-fluoroguanosine with a 3'-phosphorothioate linkage
  modified_base 3: mod_base = gm
  modified_base 4: mod_base = gm
  modified_base 5: mod_base = um
  modified_base 6: mod_base = OTHER; note = 2'-fluoroguanosine
  modified_base 7: mod_base = cm
  modified_base 8: mod_base = OTHER; note = 2'-O-methyladenosine
  modified_base 9: mod_base = gm
  modified_base 10: mod_base = um
  modified_base 11: mod_base = um
  modified_base 12: mod_base = um
  modified_base 13: mod_base = OTHER; note = 2'-O-methyladenosine
  modified_base 14: mod_base = OTHER; note = 2'-fluorouridine
  modified_base 15: mod_base = um
  modified_base 16: mod_base = OTHER; note = 2'-fluorouridine
  modified_base 17: mod_base = cm
  modified_base 18: mod_base = cm
  modified_base 19: mod_base = OTHER; note = 2'-O-methyladenosine
  modified_base 20: mod_base = cm
  modified_base 21: mod_base = OTHER; note = 2'-O-methyluridine with a 3'-phosphorothioate linkage
  modified_base 22: mod_base = OTHER; note = 2'-O-methyluridine with a 3'-phosphorothioate linkage
  modified_base 23: mod_base = cm
tgggtgcagtttatttccacttc

SEQ ID NO: 770 - RNA, 21 nt, synthetic construct
  source 1..21: mol_type = other RNA
  modified_base 1: mod_base = OTHER; note = 2'-O-methyladenosine with a 3'-phosphorothioate linkage
  modified_base 2: mod_base = OTHER; note = 2'-O-methyluridine with a 3'-phosphorothioate linkage
  modified_base 3: mod_base = gm
  modified_base 4: mod_base = OTHER; note = 2'-O-methyladenosine
  modified_base 5: mod_base = cm
  modified_base 6: mod_base = OTHER; note = 2'-O-methyladenosine
  modified_base 7: mod_base = OTHER; note = 2'-fluoroadenosine
  modified_base 8: mod_base = um
  modified_base 9: mod_base = OTHER; note = 2'-fluoroguanosine
  modified_base 10: mod_base = OTHER; note = 2'-fluorouridine
  modified_base 11: mod_base = OTHER; note = 2'-fluorocytidine
  modified_base 12: mod_base = cm
  modified_base 13: mod_base = OTHER; note = 2'-O-methyladenosine
  modified_base 14: mod_base = OTHER; note = 2'-O-methyladenosine
  modified_base 15: mod_base = gm
  modified_base 16: mod_base = OTHER; note = 2'-O-methyladenosine
  modified_base 17: mod_base = cm
  modified_base 18: mod_base = OTHER; note = 2'-O-methyladenosine
  modified_base 19: mod_base = OTHER; note = 2'-O-methylcytidine with a 3'-phosphorothioate linkage
  modified_base 20: mod_base = OTHER; note = 2'-O-methyladenosine with a 3'-phosphorothioate linkage
  modified_base 21: mod_base = OTHER; note = 2'-O-methyladenosine
atgacaatgtccaagacacaa

SEQ ID NO: 771 - RNA, 23 nt, synthetic construct
  source 1..23: mol_type = other RNA
  modified_base 1: mod_base = OTHER; note = 2'-O-methyluridine with a 3'-phosphorothioate linkage
  modified_base 2: mod_base = OTHER; note = 2'-fluorouridine with a 3'-phosphorothioate linkage
  modified_base 3: mod_base = gm
  modified_base 4: mod_base = um
  modified_base 5: mod_base = gm
  modified_base 6: mod_base = OTHER; note = 2'-fluorouridine
  modified_base 7: mod_base = cm
  modified_base 8: mod_base = um
  modified_base 9: mod_base = um
  modified_base 10: mod_base = gm
  modified_base 11: mod_base = gm
  modified_base 12: mod_base = OTHER; note = 2'-O-methyladenosine
  modified_base 13: mod_base = cm
  modified_base 14: mod_base = OTHER; note = 2'-fluoroadenosine
  modified_base 15: mod_base = um
  modified_base 16: mod_base = OTHER; note = 2'-fluorouridine
  modified_base 17: mod_base = gm
  modified_base 18: mod_base = um
  modified_base 19: mod_base = cm
  modified_base 20: mod_base = OTHER; note = 2'-O-methyladenosine
  modified_base 21: mod_base = OTHER; note = 2'-O-methyluridine with a 3'-phosphorothioate linkage
  modified_base 22: mod_base = OTHER; note = 2'-O-methyluridine with a 3'-phosphorothioate linkage
  modified_base 23: mod_base = cm
ttgtgtcttggacattgtcattc

SEQ ID NO: 772 - RNA, 21 nt, synthetic construct
  source 1..21: mol_type = other RNA
  modified_base 1: mod_base = OTHER; note = 2'-O-methylguanosine with a 3'-phosphorothioate linkage
  modified_base 2: mod_base = OTHER; note = 2'-O-methyladenosine with a 3'-phosphorothioate linkage
  modified_base 3: mod_base = um
  modified_base 4: mod_base = um
  modified_base 5: mod_base = gm
  modified_base 6: mod_base = um
  modified_base 7: mod_base = OTHER; note = 2'-fluoroguanosine
  modified_base 8: mod_base = um
  modified_base 9: mod_base = OTHER; note = 2'-fluoroguanosine
  modified_base 10: mod_base = OTHER; note = 2'-fluoroadenosine
  modified_base 11: mod_base = OTHER; note = 2'-fluorouridine
  modified_base 12: mod_base = gm
  modified_base 13: mod_base = OTHER; note = 2'-O-methyladenosine
  modified_base 14: mod_base = OTHER; note = 2'-O-methyladenosine
  modified_base 15: mod_base = gm
  modified_base 16: mod_base = gm
  modified_base 17: mod_base = OTHER; note = 2'-O-methyladenosine
  modified_base 18: mod_base = cm
  modified_base 19: mod_base = OTHER; note = 2'-O-methyladenosine with a 3'-phosphorothioate linkage
  modified_base 20: mod_base = OTHER; note = 2'-O-methyluridine with a 3'-phosphorothioate linkage
  modified_base 21: mod_base = OTHER; note = 2'-O-methyladenosine
gattgtgtgatgaaggacata

SEQ ID NO: 773 - RNA, 23 nt, synthetic construct
  source 1..23: mol_type = other RNA
  modified_base 1: mod_base = OTHER; note = 2'-O-methyluridine with a 3'-phosphorothioate linkage
  modified_base 2: mod_base = OTHER; note = 2'-fluoroadenosine with a 3'-phosphorothioate linkage
  modified_base 3: mod_base = um
  modified_base 4: mod_base = gm
  modified_base 5: mod_base = um
  modified_base 6: mod_base = OTHER; note = 2'-fluorocytidine
  modified_base 7: mod_base = cm
  modified_base 8: mod_base = um
  modified_base 9: mod_base = um
  modified_base 10: mod_base = cm
  modified_base 11: mod_base = OTHER; note = 2'-O-methyladenosine
  modified_base 12: mod_base = um
  modified_base 13: mod_base = cm
  modified_base 14: mod_base = OTHER; note = 2'-fluoroadenosine
  modified_base 15: mod_base = cm
  modified_base 16: mod_base = OTHER; note = 2'-fluoroadenosine
  modified_base 17: mod_base = cm
  modified_base 18: mod_base = OTHER; note = 2'-O-methyladenosine
  modified_base 19: mod_base = OTHER; note = 2'-O-methyladenosine
  modified_base 20: mod_base = um
  modified_base 21: mod_base = OTHER; note = 2'-O-methylcytidine with a 3'-phosphorothioate linkage
  modified_base 22: mod_base = OTHER; note = 2'-O-methyluridine with a 3'-phosphorothioate linkage
  modified_base 23: mod_base = OTHER; note = 2'-O-methyladenosine
tatgtccttcatcacacaatcta

SEQ ID NO: 774 - RNA, 21 nt, synthetic construct
  source 1..21: mol_type = other RNA
  modified_base 1: mod_base = OTHER; note = 2'-O-methylguanosine with a 3'-phosphorothioate linkage
  modified_base 2: mod_base = OTHER; note = 2'-O-methylguanosine with a 3'-phosphorothioate linkage
  modified_base 3: mod_base = gm
  modified_base 4: mod_base = gm
  modified_base 5: mod_base = OTHER; note = 2'-O-methyladenosine
  modified_base 6: mod_base = um
  modified_base 7: mod_base = OTHER; note = 2'-fluoroguanosine
  modified_base 8: mod_base = OTHER; note = 2'-O-methyladenosine
  modified_base 9: mod_base = OTHER; note = 2'-fluoroadenosine
  modified_base 10: mod_base = OTHER; note = 2'-fluorocytidine
  modified_base 11: mod_base = OTHER; note = 2'-fluorocytidine
  modified_base 12: mod_base = OTHER; note = 2'-O-methyladenosine
  modified_base 13: mod_base = gm
  modified_base 14: mod_base = OTHER; note = 2'-O-methyladenosine
  modified_base 15: mod_base = cm
  modified_base 16: mod_base = um
  modified_base 17: mod_base = gm
  modified_base 18: mod_base = cm
  modified_base 19: mod_base = OTHER; note = 2'-O-methylguanosine with a 3'-phosphorothioate linkage
  modified_base 20: mod_base = OTHER; note = 2'-O-methyluridine with a 3'-phosphorothioate linkage
  modified_base 21: mod_base = OTHER; note = 2'-O-methyladenosine
ggggatgaaccagactgcgta

SEQ ID NO: 775 - RNA, 23 nt, synthetic construct
  source 1..23: mol_type = other RNA
  modified_base 1: mod_base = OTHER; note = 2'-O-methyluridine with a 3'-phosphorothioate linkage
  modified_base 2: mod_base = OTHER; note = 2'-fluoroadenosine with a 3'-phosphorothioate linkage
  modified_base 3: mod_base = cm
  modified_base 4: mod_base = gm
  modified_base 5: mod_base = cm
  modified_base 6: mod_base = OTHER; note = 2'-fluoroadenosine
  modified_base 7: mod_base = gm
  modified_base 8: mod_base = um
  modified_base 9: mod_base = cm
  modified_base 10: mod_base = um
  modified_base 11: mod_base = gm
  modified_base 12: mod_base = gm
  modified_base 13: mod_base = um
  modified_base 14: mod_base = OTHER; note = 2'-fluorouridine
  modified_base 15: mod_base = cm
  modified_base 16: mod_base = OTHER; note = 2'-fluoroadenosine
  modified_base 17: mod_base = um
  modified_base 18: mod_base = cm
  modified_base 19: mod_base = cm
  modified_base 20: mod_base = cm
  modified_base 21: mod_base = OTHER; note = 2'-O-methylcytidine with a 3'-phosphorothioate linkage
  modified_base 22: mod_base = OTHER; note = 2'-O-methyladenosine with a 3'-phosphorothioate linkage
  modified_base 23: mod_base = um
tacgcagtctggttcatccccat

SEQ ID NO: 776 - RNA, 21 nt, synthetic construct
  source 1..21: mol_type = other RNA
  modified_base 1: mod_base = OTHER; note = 2'-O-methylguanosine with a 3'-phosphorothioate linkage
  modified_base 2: mod_base = OTHER; note = 2'-O-methyluridine with a 3'-phosphorothioate linkage
  modified_base 3: mod_base = um
  modified_base 4: mod_base = OTHER; note = 2'-O-methyladenosine
  modified_base 5: mod_base = OTHER; note = 2'-O-methyladenosine
  modified_base 6: mod_base = um
  modified_base 7: mod_base = OTHER; note = 2'-fluoroguanosine
  modified_base 8: mod_base = cm
  modified_base 9: mod_base = OTHER; note = 2'-fluorocytidine
  modified_base 10: mod_base = OTHER; note = 2'-fluorocytidine
  modified_base 11: mod_base = OTHER; note = 2'-fluoroadenosine
  modified_base 12: mod_base = OTHER; note = 2'-O-methyladenosine
  modified_base 13: mod_base = gm
  modified_base 14: mod_base = um
  modified_base 15: mod_base = gm
  modified_base 16: mod_base = OTHER; note = 2'-O-methyladenosine
  modified_base 17: mod_base = cm
  modified_base 18: mod_base = um
  modified_base 19: mod_base = OTHER; note = 2'-O-methylguanosine with a 3'-phosphorothioate linkage
  modified_base 20: mod_base = OTHER; note = 2'-O-methyladenosine with a 3'-phosphorothioate linkage
  modified_base 21: mod_base = OTHER; note = 2'-O-methyladenosine
gttaatgcccaagtgactgaa

SEQ ID NO: 777 - RNA, 23 nt, synthetic construct
  source 1..23: mol_type = other RNA
  modified_base 1: mod_base = OTHER; note = 2'-O-methyluridine with a 3'-phosphorothioate linkage
  modified_base 2: mod_base = OTHER; note = 2'-fluorouridine with a 3'-phosphorothioate linkage
  modified_base 3: mod_base = cm
  modified_base 4: mod_base = OTHER; note = 2'-O-methyladenosine
  modified_base 5: mod_base = gm
  modified_base 6: mod_base = OTHER; note = 2'-fluorouridine
  modified_base 7: mod_base = cm
  modified_base 8: mod_base = OTHER; note = 2'-O-methyladenosine
  modified_base 9: mod_base = cm
  modified_base 10: mod_base = um
  modified_base 11: mod_base = um
  modified_base 12: mod_base = gm
  modified_base 13: mod_base = gm
  modified_base 14: mod_base = OTHER; note = 2'-fluoroguanosine
  modified_base 15: mod_base = cm
  modified_base 16: mod_base = OTHER; note = 2'-fluoroadenosine
  modified_base 17: mod_base = um
  modified_base 18: mod_base = um
  modified_base 19: mod_base = OTHER; note = 2'-O-methyladenosine
  modified_base 20: mod_base = OTHER; note = 2'-O-methyladenosine
  modified_base 21: mod_base = OTHER; note = 2'-O-methylcytidine with a 3'-phosphorothioate linkage
  modified_base 22: mod_base = OTHER; note = 2'-O-methyladenosine with a 3'-phosphorothioate linkage
  modified_base 23: mod_base = cm
ttcagtcacttgggcattaacac

SEQ ID NO: 778 - RNA, 21 nt, synthetic construct
  source 1..21: mol_type = other RNA
  modified_base 1: mod_base = OTHER; note = 2'-O-methyladenosine with a 3'-phosphorothioate linkage
  modified_base 2: mod_base = OTHER; note = 2'-O-methylcytidine with a 3'-phosphorothioate linkage
  modified_base 3: mod_base = cm
  modified_base 4: mod_base = OTHER; note = 2'-O-methyladenosine
  modified_base 5: mod_base = gm
  modified_base 6: mod_base = OTHER; note = 2'-O-methyladenosine
  modified_base 7: mod_base = OTHER; note = 2'-fluorocytidine
  modified_base 8: mod_base = um
  modified_base 9: mod_base = OTHER; note = 2'-fluoroguanosine
  modified_base 10: mod_base = OTHER; note = 2'-fluorocytidine
  modified_base 11: mod_base = OTHER; note = 2'-fluoroguanosine
  modified_base 12: mod_base = um
  modified_base 13: mod_base = gm
  modified_base 14: mod_base = cm
  modified_base 15: mod_base = cm
  modified_base 16: mod_base = cm
  modified_base 17: mod_base = um
  modified_base 18: mod_base = gm
  modified_base 19: mod_base = OTHER; note = 2'-O-methylcytidine with a 3'-phosphorothioate linkage
  modified_base 20: mod_base = OTHER; note = 2'-O-methylcytidine with a 3'-phosphorothioate linkage
  modified_base 21: mod_base = OTHER; note = 2'-O-methyladenosine
accagactgcgtgccctgcca

SEQ ID NO: 779 - RNA, 23 nt, synthetic construct
  source 1..23: mol_type = other RNA
  modified_base 1: mod_base = OTHER; note = 2'-O-methyluridine with a 3'-phosphorothioate linkage
  modified_base 2: mod_base = OTHER; note = 2'-fluoroguanosine with a 3'-phosphorothioate linkage
  modified_base 3: mod_base = gm
  modified_base 4: mod_base = cm
  modified_base 5: mod_base = OTHER; note = 2'-O-methyladenosine
  modified_base 6: mod_base = OTHER; note = 2'-fluoroguanosine
  modified_base 7: mod_base = gm
  modified_base 8: mod_base = gm
  modified_base 9: mod_base = cm
  modified_base 10: mod_base = OTHER; note = 2'-O-methyladenosine
  modified_base 11: mod_base = cm
  modified_base 12: mod_base = gm
  modified_base 13: mod_base = cm
  modified_base 14: mod_base = OTHER; note = 2'-fluoroadenosine
  modified_base 15: mod_base = gm
  modified_base 16: mod_base = OTHER; note = 2'-fluorouridine
  modified_base 17: mod_base = cm
  modified_base 18: mod_base = um
  modified_base 19: mod_base = gm
  modified_base 20: mod_base = gm
  modified_base 21: mod_base = OTHER; note = 2'-O-methyluridine with a 3'-phosphorothioate linkage
  modified_base 22: mod_base = OTHER; note = 2'-O-methyluridine with a 3'-phosphorothioate linkage
  modified_base 23: mod_base = cm
tggcagggcacgcagtctggttc

SEQ ID NO: 780 - RNA, 21 nt, synthetic construct
  source 1..21: mol_type = other RNA
  modified_base 1: mod_base = OTHER; note = 2'-O-methyladenosine with a 3'-phosphorothioate linkage
  modified_base 2: mod_base = OTHER; note = 2'-O-methyladenosine with a 3'-phosphorothioate linkage
  modified_base 3: mod_base = cm
  modified_base 4: mod_base = OTHER; note = 2'-O-methyladenosine
  modified_base 5: mod_base = cm
  modified_base 6: mod_base = um
  modified_base 7: mod_base = OTHER; note = 2'-fluoroguanosine
  modified_base 8: mod_base = um
  modified_base 9: mod_base = OTHER; note = 2'-fluoroguanosine
  modified_base 10: mod_base = OTHER; note = 2'-fluoroadenosine
  modified_base 11: mod_base = OTHER; note = 2'-fluorocytidine
  modified_base 12: mod_base = cm
  modified_base 13: mod_base = cm
  modified_base 14: mod_base = um
  modified_base 15: mod_base = um
  modified_base 16: mod_base = gm
  modified_base 17: mod_base = cm
  modified_base 18: mod_base = OTHER; note = 2'-O-methyladenosine
  modified_base 19: mod_base = OTHER; note = 2'-O-methylcytidine with a 3'-phosphorothioate linkage
  modified_base 20: mod_base = OTHER; note = 2'-O-methylcytidine with a 3'-phosphorothioate linkage
  modified_base 21: mod_base = OTHER; note = 2'-O-methyladenosine
aacactgtgacccttgcacca

SEQ ID NO: 781 - RNA, 23 nt, synthetic construct
  source 1..23: mol_type = other RNA
  modified_base 1: mod_base = OTHER; note = 2'-O-methyluridine with a 3'-phosphorothioate linkage
  modified_base 2: mod_base = OTHER; note = 2'-fluoroguanosine with a 3'-phosphorothioate linkage
  modified_base 3: mod_base = gm
  modified_base 4: mod_base = um
  modified_base 5: mod_base = gm
  modified_base 6: mod_base = OTHER; note = 2'-fluorocytidine
  modified_base 7: mod_base = OTHER; note = 2'-O-methyladenosine
  modified_base 8: mod_base = OTHER; note = 2'-O-methyladenosine
  modified_base 9: mod_base = gm
  modified_base 10: mod_base = gm
  modified_base 11: mod_base = gm
  modified_base 12: mod_base = um
  modified_base 13: mod_base = cm
  modified_base 14: mod_base = OTHER; note = 2'-fluoroadenosine
  modified_base 15: mod_base = cm
  modified_base 16: mod_base = OTHER; note = 2'-fluoroadenosine
  modified_base 17: mod_base = gm
  modified_base 18: mod_base = um
  modified_base 19: mod_base = gm
  modified_base 20: mod_base = um
  modified_base 21: mod_base = OTHER; note = 2'-O-methyluridine with a 3'-phosphorothioate linkage
  modified_base 22: mod_base = OTHER; note = 2'-O-methylcytidine with a 3'-phosphorothioate linkage
  modified_base 23: mod_base = OTHER; note = 2'-O-methyladenosine
tggtgcaagggtcacagtgttca

SEQ ID NO: 782 - RNA, 21 nt, synthetic construct
  source 1..21: mol_type = other RNA
  modified_base 1: mod_base = OTHER; note = 2'-O-methylguanosine with a 3'-phosphorothioate linkage
  modified_base 2: mod_base = OTHER; note = 2'-O-methylguanosine with a 3'-phosphorothioate linkage
  modified_base 3: mod_base = OTHER; note = 2'-O-methyladenosine
  modified_base 4: mod_base = OTHER; note = 2'-O-methyladenosine
  modified_base 5: mod_base = gm
  modified_base 6: mod_base = gm
  modified_base 7: mod_base = OTHER; note = 2'-fluoroadenosine
  modified_base 8: mod_base = gm
  modified_base 9: mod_base = OTHER; note = 2'-fluorouridine
  modified_base 10: mod_base = OTHER; note = 2'-fluoroadenosine
  modified_base 11: mod_base = OTHER; note = 2'-fluorocytidine
  modified_base 12: mod_base = OTHER; note = 2'-O-methyladenosine
  modified_base 13: mod_base = cm
  modified_base 14: mod_base = OTHER; note = 2'-O-methyladenosine
  modified_base 15: mod_base = gm
  modified_base 16: mod_base = OTHER; note = 2'-O-methyladenosine
  modified_base 17: mod_base = cm
  modified_base 18: mod_base = OTHER; note = 2'-O-methyladenosine
  modified_base 19: mod_base = OTHER; note = 2'-O-methyladenosine with a 3'-phosphorothioate linkage
  modified_base 20: mod_base = OTHER; note = 2'-O-methyladenosine with a 3'-phosphorothioate linkage
  modified_base 21: mod_base = OTHER; note = 2'-O-methyladenosine
ggaaggagtacacagacaaaa

SEQ ID NO: 783 - RNA, 23 nt, synthetic construct
  source 1..23: mol_type = other RNA
  modified_base 1: mod_base = OTHER; note = 2'-O-methyluridine with a 3'-phosphorothioate linkage
  modified_base 2: mod_base = OTHER; note = 2'-fluorouridine with a 3'-phosphorothioate linkage
  modified_base 3: mod_base = um
  modified_base 4: mod_base = um
  modified_base 5: mod_base = gm
  modified_base 6: mod_base = OTHER; note = 2'-fluorouridine
  modified_base 7: mod_base = cm
  modified_base 8: mod_base = um
  modified_base 9: mod_base = gm
  modified_base 10: mod_base = um
  modified_base 11: mod_base = gm
  modified_base 12: mod_base = um
  modified_base 13: mod_base = OTHER; note = 2'-O-methyladenosine
  modified_base 14: mod_base = OTHER; note = 2'-fluorocytidine
  modified_base 15: mod_base = um
  modified_base 16: mod_base = OTHER; note = 2'-fluorocytidine
  modified_base 17: mod_base = cm
  modified_base 18: mod_base = um
  modified_base 19: mod_base = um
  modified_base 20: mod_base = cm
  modified_base 21: mod_base = OTHER; note = 2'-O-methylcytidine with a 3'-phosphorothioate linkage
  modified_base 22: mod_base = OTHER; note = 2'-O-methylcytidine with a 3'-phosphorothioate linkage
  modified_base 23: mod_base = um
ttttgtctgtgtactccttccct

SEQ ID NO: 784 - RNA, 21 nt, synthetic construct
  source 1..21: mol_type = other RNA
  modified_base 1: mod_base = OTHER; note = 2'-O-methylguanosine with a 3'-phosphorothioate linkage
  modified_base 2: mod_base = OTHER; note = 2'-O-methylguanosine with a 3'-phosphorothioate linkage
  modified_base 3: mod_base = gm
  modified_base 4: mod_base = OTHER; note = 2'-O-methyladenosine
  modified_base 5: mod_base = um
  modified_base 6: mod_base = gm
  modified_base 7: mod_base = OTHER; note = 2'-fluoroadenosine
  modified_base 8: mod_base = OTHER; note = 2'-O-methyladenosine
  modified_base 9: mod_base = OTHER; note = 2'-fluorocytidine
  modified_base 10: mod_base = OTHER; note = 2'-fluorocytidine
  modified_base 11: mod_base = OTHER; note = 2'-fluoroadenosine
  modified_base 12: mod_base = gm
  modified_base 13: mod_base = OTHER; note = 2'-O-methyladenosine
  modified_base 14: mod_base = cm
  modified_base 15: mod_base = um
  modified_base 16: mod_base = gm
  modified_base 17: mod_base = cm
  modified_base 18: mod_base = gm
  modified_base 19: mod_base = OTHER; note = 2'-O-methyluridine with a 3'-phosphorothioate linkage
  modified_base 20: mod_base = OTHER; note = 2'-O-methylguanosine with a 3'-phosphorothioate linkage
  modified_base 21: mod_base = OTHER; note = 2'-O-methyladenosine
gggatgaaccagactgcgtga

SEQ ID NO: 785 - RNA, 23 nt, synthetic construct
  source 1..23: mol_type = other RNA
  modified_base 1: mod_base = OTHER; note = 2'-O-methyluridine with a 3'-phosphorothioate linkage
  modified_base 2: mod_base = OTHER; note = 2'-fluorocytidine with a 3'-phosphorothioate linkage
  modified_base 3: mod_base = OTHER; note = 2'-O-methyladenosine
  modified_base 4: mod_base = cm
  modified_base 5: mod_base = gm
  modified_base 6: mod_base = OTHER; note = 2'-fluorocytidine
  modified_base 7: mod_base = OTHER; note = 2'-O-methyladenosine
  modified_base 8: mod_base = gm
  modified_base 9: mod_base = um
  modified_base 10: mod_base = cm
  modified_base 11: mod_base = um
  modified_base 12: mod_base = gm
  modified_base 13: mod_base = gm
  modified_base 14: mod_base = OTHER; note = 2'-fluorouridine
  modified_base 15: mod_base = um
  modified_base 16: mod_base = OTHER; note = 2'-fluorocytidine
  modified_base 17: mod_base = OTHER; note = 2'-O-methyladenosine
  modified_base 18: mod_base = um
  modified_base 19: mod_base = cm
  modified_base 20: mod_base = cm
  modified_base 21: mod_base = OTHER; note = 2'-O-methylcytidine with a 3'-phosphorothioate linkage
  modified_base 22: mod_base = OTHER; note = 2'-O-methylcytidine with a 3'-phosphorothioate linkage
  modified_base 23: mod_base = OTHER; note = 2'-O-methyladenosine
tcacgcagtctggttcatcccca

SEQ ID NO: 786 - RNA, 21 nt, synthetic construct
  source 1..21: mol_type = other RNA
  modified_base 1: mod_base = OTHER; note = 2'-O-methylcytidine with a 3'-phosphorothioate linkage
  modified_base 2: mod_base = OTHER; note = 2'-O-methyluridine with a 3'-phosphorothioate linkage
  modified_base 3: mod_base = gm
  modified_base 4: mod_base = cm
  modified_base 5: mod_base = gm
  modified_base 6: mod_base = um
  modified_base 7: mod_base = OTHER; note = 2'-fluoroguanosine
  modified_base 8: mod_base = cm
  modified_base 9: mod_base = OTHER; note = 2'-fluorocytidine
  modified_base 10: mod_base = OTHER; note = 2'-fluorocytidine
  modified_base 11: mod_base = OTHER; note = 2'-fluorouridine
  modified_base 12: mod_base = gm
  modified_base 13: mod_base = cm
  modified_base 14: mod_base = cm
  modified_base 15: mod_base = OTHER; note = 2'-O-methyladenosine
  modified_base 16: mod_base = OTHER; note = 2'-O-methyladenosine
  modified_base 17: mod_base = gm
  modified_base 18: mod_base = OTHER; note = 2'-O-methyladenosine
  modified_base 19: mod_base = OTHER; note = 2'-O-methyladenosine with a 3'-phosphorothioate linkage
  modified_base 20: mod_base = OTHER; note = 2'-O-methylguanosine with a 3'-phosphorothioate linkage
  modified_base 21: mod_base = OTHER; note = 2'-O-methyladenosine
ctgcgtgccctgccaagaaga

SEQ ID NO: 787 - RNA, 23 nt, synthetic construct
  source 1..23: mol_type = other RNA
  modified_base 1: mod_base = OTHER; note = 2'-O-methyluridine with a 3'-phosphorothioate linkage
  modified_base 2: mod_base = OTHER; note = 2'-fluorocytidine with a 3'-phosphorothioate linkage
  modified_base 3: mod_base = um
  modified_base 4: mod_base = um
  modified_base 5: mod_base = cm
  modified_base 6: mod_base = OTHER; note = 2'-fluorouridine
  modified_base 7: mod_base = um
  modified_base 8: mod_base = gm
  modified_base 9: mod_base = gm
  modified_base 10: mod_base = cm
  modified_base 11: mod_base = OTHER; note = 2'-O-methyladenosine
  modified_base 12: mod_base = gm
  modified_base 13: mod_base = gm
  modified_base 14: mod_base = OTHER; note = 2'-fluoroguanosine
  modified_base 15: mod_base = cm
  modified_base 16: mod_base = OTHER; note = 2'-fluoroadenosine
  modified_base 17: mod_base = cm
  modified_base 18: mod_base = gm
  modified_base 19: mod_base = cm
  modified_base 20: mod_base = OTHER; note = 2'-O-methyladenosine
  modified_base 21: mod_base = OTHER; note = 2'-O-methylguanosine with a 3'-phosphorothioate linkage
  modified_base 22: mod_base = OTHER; note = 2'-O-methyluridine with a 3'-phosphorothioate linkage
  modified_base 23: mod_base = cm
tcttcttggcagggcacgcagtc

SEQ ID NO: 788 - RNA, 21 nt, synthetic construct
  source 1..21: mol_type = other RNA
  modified_base 1: mod_base = OTHER; note = 2'-O-methyluridine with a 3'-phosphorothioate linkage
  modified_base 2: mod_base = OTHER; note = 2'-O-methylguanosine with a 3'-phosphorothioate linkage
  modified_base 3: mod_base = OTHER; note = 2'-O-methyladenosine
  modified_base 4: mod_base = OTHER; note = 2'-O-methyladenosine
  modified_base 5: mod_base = cm
  modified_base 6: mod_base = OTHER; note = 2'-O-methyladenosine
  modified_base 7: mod_base = OTHER; note = 2'-fluorocytidine
  modified_base 8: mod_base = um
  modified_base 9: mod_base = OTHER; note = 2'-fluoroguanosine
  modified_base 10: mod_base = OTHER; note = 2'-fluorouridine
  modified_base 11: mod_base = OTHER; note = 2'-fluoroguanosine
  modified_base 12: mod_base = OTHER; note = 2'-O-methyladenosine
  modified_base 13: mod_base = cm
  modified_base 14: mod_base = cm
  modified_base 15: mod_base = cm
  modified_base 16: mod_base = um
  modified_base 17: mod_base = um
  modified_base 18: mod_base = gm
  modified_base 19: mod_base = OTHER; note = 2'-O-methylcytidine with a 3'-phosphorothioate linkage
  modified_base 20: mod_base = OTHER; note = 2'-O-methyladenosine with a 3'-phosphorothioate linkage
  modified_base 21: mod_base = OTHER; note = 2'-O-methyladenosine
tgaacactgtgacccttgcaa

SEQ ID NO: 789 - RNA, 23 nt, synthetic construct
  source 1..23: mol_type = other RNA
  modified_base 1: mod_base = OTHER; note = 2'-O-methyluridine with a 3'-phosphorothioate linkage
  modified_base 2: mod_base = OTHER; note = 2'-fluorouridine with a 3'-phosphorothioate linkage
  modified_base 3: mod_base = gm
  modified_base 4: mod_base = cm
  modified_base 5: mod_base = OTHER; note = 2'-O-methyladenosine
  modified_base 6: mod_base = OTHER; note = 2'-fluoroadenosine
  modified_base 7: mod_base = gm
  modified_base 8: mod_base = gm
  modified_base 9: mod_base = gm
  modified_base 10: mod_base = um
  modified_base 11: mod_base = cm
  modified_base 12: mod_base = OTHER; note = 2'-O-methyladenosine
  modified_base 13: mod_base = cm
  modified_base 14: mod_base = OTHER; note = 2'-fluoroadenosine
  modified_base 15: mod_base = gm
  modified_base 16: mod_base = OTHER; note = 2'-fluorouridine
  modified_base 17: mod_base = gm
  modified_base 18: mod_base = um
  modified_base 19: mod_base = um
  modified_base 20: mod_base = cm
  modified_base 21: mod_base = OTHER; note = 2'-O-methyladenosine with a 3'-phosphorothioate linkage
  modified_base 22: mod_base = OTHER; note = 2'-O-methylcytidine with a 3'-phosphorothioate linkage
  modified_base 23: mod_base = OTHER; note = 2'-O-methyladenosine
ttgcaagggtcacagtgttcaca

SEQ ID NO: 790 - RNA, 21 nt, synthetic construct
  source 1..21: mol_type = other RNA
  modified_base 1: mod_base = OTHER; note = 2'-O-methyladenosine with a 3'-phosphorothioate linkage
  modified_base 2: mod_base = OTHER; note = 2'-O-methylguanosine with a 3'-phosphorothioate linkage
  modified_base 3: mod_base = gm
  modified_base 4: mod_base = OTHER; note = 2'-O-methyladenosine
  modified_base 5: mod_base = um
  modified_base 6: mod_base = um
  modified_base 7: mod_base = OTHER; note = 2'-fluoroguanosine
  modified_base 8: mod_base = cm
  modified_base 9: mod_base = OTHER; note = 2'-fluorouridine
  modified_base 10: mod_base = OTHER; note = 2'-fluorocytidine
  modified_base 11: mod_base = OTHER; note = 2'-fluoroadenosine
  modified_base 12: mod_base = OTHER; note = 2'-O-methyladenosine
  modified_base 13: mod_base = cm
  modified_base 14: mod_base = OTHER; note = 2'-O-methyladenosine
  modified_base 15: mod_base = OTHER; note = 2'-O-methyladenosine
  modified_base 16: mod_base = cm
  modified_base 17: mod_base = cm
  modified_base 18: mod_base = OTHER; note = 2'-O-methyladenosine
  modified_base 19: mod_base = OTHER; note = 2'-O-methyluridine with a 3'-phosphorothioate linkage
  modified_base 20: mod_base = OTHER; note = 2'-O-methylguanosine with a 3'-phosphorothioate linkage
  modified_base 21: mod_base = OTHER; note = 2'-O-methyladenosine
aggattgctcaacaaccatga

SEQ ID NO: 791 - RNA, 23 nt, synthetic construct
  source 1..23: mol_type = other RNA
  modified_base 1: mod_base = OTHER; note = 2'-O-methyluridine with a 3'-phosphorothioate linkage
  modified_base 2: mod_base = OTHER; note = 2'-fluorocytidine with a 3'-phosphorothioate linkage
  modified_base 3: mod_base = OTHER; note = 2'-O-methyladenosine
  modified_base 4: mod_base = um
  modified_base 5: mod_base = gm
  modified_base 6: mod_base = OTHER; note = 2'-fluoroguanosine
  modified_base 7: mod_base = um
  modified_base 8: mod_base = um
  modified_base 9: mod_base = gm
  modified_base 10: mod_base = um
  modified_base 11: mod_base = um
  modified_base 12: mod_base = gm
  modified_base 13: mod_base = OTHER; note = 2'-O-methyladenosine
  modified_base 14: mod_base = OTHER; note = 2'-fluoroguanosine
  modified_base 15: mod_base = cm
  modified_base 16: mod_base = OTHER; note = 2'-fluoroadenosine
  modified_base 17: mod_base = OTHER; note = 2'-O-methyladenosine
  modified_base 18: mod_base = um
  modified_base 19: mod_base = cm
  modified_base 20: mod_base = cm
  modified_base 21: mod_base = OTHER; note = 2'-O-methyluridine with a 3'-phosphorothioate linkage
  modified_base 22: mod_base = OTHER; note = 2'-O-methylcytidine with a 3'-phosphorothioate linkage
  modified_base 23: mod_base = cm
tcatggttgttgagcaatcctcc

SEQ ID NO: 792 - RNA, 21 nt, synthetic construct
  source 1..21: mol_type = other RNA
  modified_base 1: mod_base = OTHER; note = 2'-O-methyluridine with a 3'-phosphorothioate linkage
  modified_base 2: mod_base = OTHER; note = 2'-O-methylguanosine with a 3'-phosphorothioate linkage
  modified_base 3: mod_base = OTHER; note = 2'-O-methyladenosine
  modified_base 4: mod_base = cm
  modified_base 5: mod_base = OTHER; note = 2'-O-methyladenosine
  modified_base 6: mod_base = cm
  modified_base 7: mod_base = OTHER; note = 2'-fluorouridine
  modified_base 8: mod_base = OTHER; note = 2'-O-methyladenosine
  modified_base 9: mod_base = OTHER; note = 2'-fluoroadenosine
  modified_base 10: mod_base = OTHER; note = 2'-fluoroguanosine
  modified_base 11: mod_base = OTHER; note = 2'-fluorouridine
  modified_base 12: mod_base = cm
  modified_base 13: mod_base = OTHER; note = 2'-O-methyladenosine
  modified_base 14: mod_base = OTHER; note = 2'-O-methyladenosine
  modified_base 15: mod_base = gm
  modified_base 16: mod_base = um
  modified_base 17: mod_base = um
  modified_base 18: mod_base = OTHER; note = 2'-O-methyladenosine
  modified_base 19: mod_base = OTHER; note = 2'-O-methyladenosine with a 3'-phosphorothioate linkage
  modified_base 20: mod_base = OTHER; note = 2'-O-methyladenosine with a 3'-phosphorothioate linkage
  modified_base 21: mod_base = OTHER; note = 2'-O-methyladenosine
tgacactaagtcaagttaaaa

SEQ ID NO: 793 - RNA, 23 nt, synthetic construct
  source 1..23: mol_type = other RNA
  modified_base 1: mod_base = OTHER; note = 2'-O-methyluridine with a 3'-phosphorothioate linkage
  modified_base 2: mod_base = OTHER; note = 2'-fluorouridine with a 3'-phosphorothioate linkage
  modified_base 3: mod_base = um
  modified_base 4: mod_base = um
  modified_base 5: mod_base = OTHER; note = 2'-O-methyladenosine
  modified_base 6: mod_base = OTHER; note = 2'-fluoroadenosine
  modified_base 7: mod_base = cm
  modified_base 8: mod_base = um
  modified_base 9: mod_base = um
  modified_base 10: mod_base = gm
  modified_base 11: mod_base = OTHER; note = 2'-O-methyladenosine
  modified_base 12: mod_base = cm
  modified_base 13: mod_base = um
  modified_base 14: mod_base = OTHER; note = 2'-fluorouridine
  modified_base 15: mod_base = OTHER; note = 2'-O-methyladenosine
  modified_base 16: mod_base = OTHER; note = 2'-fluoroguanosine
  modified_base 17: mod_base = um
  modified_base 18: mod_base = gm
  modified_base 19: mod_base = um
  modified_base 20: mod_base = cm
  modified_base 21: mod_base = OTHER; note = 2'-O-methyladenosine with a 3'-phosphorothioate linkage
  modified_base 22: mod_base = OTHER; note = 2'-O-methyluridine with a 3'-phosphorothioate linkage
  modified_base 23: mod_base = gm
ttttaacttgacttagtgtcatg

SEQ ID NO: 794 - RNA, 21 nt, synthetic construct
  source 1..21: mol_type = other RNA
  modified_base 1: mod_base = OTHER; note = 2'-O-methyluridine with a 3'-phosphorothioate linkage
  modified_base 2: mod_base = OTHER; note = 2'-O-methylguanosine with a 3'-phosphorothioate linkage
  modified_base 3: mod_base = OTHER; note = 2'-O-methyladenosine
  modified_base 4: mod_base = OTHER; note = 2'-O-methyladenosine
  modified_base 5: mod_base = OTHER; note = 2'-O-methyladenosine
  modified_base 6: mod_base = gm
  modified_base 7: mod_base = OTHER; note = 2'-fluoroguanosine
  modified_base 8: mod_base = OTHER; note = 2'-O-methyladenosine
  modified_base 9: mod_base = OTHER; note = 2'-fluoroadenosine
  modified_base 10: mod_base = OTHER; note = 2'-fluoroadenosine
  modified_base 11: mod_base = OTHER; note = 2'-fluoroguanosine
  modified_base 12: mod_base = cm
  modified_base 13: mod_base = um
  modified_base 14: mod_base = OTHER; note = 2'-O-methyladenosine
  modified_base 15: mod_base = gm
  modified_base 16: mod_base = gm
  modified_base 17: mod_base = gm
  modified_base 18: mod_base = OTHER; note = 2'-O-methyladenosine
  modified_base 19: mod_base = OTHER; note = 2'-O-methylcytidine with a 3'-phosphorothioate linkage
  modified_base 20: mod_base = OTHER; note = 2'-O-methyluridine with a 3'-phosphorothioate linkage
  modified_base 21: mod_base = OTHER; note = 2'-O-methyladenosine
tgaaaggaaagctagggacta

SEQ ID NO: 795 - RNA, 23 nt, synthetic construct
  source 1..23: mol_type = other RNA
  modified_base 1: mod_base = OTHER; note = 2'-O-methyluridine with a 3'-phosphorothioate linkage
  modified_base 2: mod_base = OTHER; note = 2'-fluoroadenosine with a 3'-phosphorothioate linkage
  modified_base 3: mod_base = gm
  modified_base 4: mod_base = um
  modified_base 5: mod_base = cm
  modified_base 6: mod_base = OTHER; note = 2'-fluorocytidine
  modified_base 7: mod_base = cm
  modified_base 8: mod_base = um
  modified_base 9: mod_base = OTHER; note = 2'-O-methyladenosine
  modified_base 10: mod_base = gm
  modified_base 11: mod_base = cm
  modified_base 12: mod_base = um
  modified_base 13: mod_base = um
  modified_base 14: mod_base = OTHER; note = 2'-fluorouridine
  modified_base 15: mod_base = cm
  modified_base 16: mod_base = OTHER; note = 2'-fluorocytidine
  modified_base 17: mod_base = um
  modified_base 18: mod_base = um
  modified_base 19: mod_base = um
  modified_base 20: mod_base = cm
  modified_base 21: mod_base = OTHER; note = 2'-O-methyladenosine with a 3'-phosphorothioate linkage
  modified_base 22: mod_base = OTHER; note = 2'-O-methylcytidine with a 3'-phosphorothioate linkage
  modified_base 23: mod_base = cm
tagtccctagctttcctttcacc

SEQ ID NO: 796 - RNA, 21 nt, synthetic construct
  source 1..21: mol_type = other RNA
  modified_base 1: mod_base = OTHER; note = 2'-O-methyladenosine with a 3'-phosphorothioate linkage
  modified_base 2: mod_base = OTHER; note = 2'-O-methylcytidine with a 3'-phosphorothioate linkage
  modified_base 3: mod_base = OTHER; note = 2'-O-methyladenosine
  modified_base 4: mod_base = OTHER; note = 2'-O-methyladenosine
  modified_base 5: mod_base = um
  modified_base 6: mod_base = gm
  modified_base 7: mod_base = OTHER; note = 2'-fluorouridine
  modified_base 8: mod_base = cm
  modified_base 9: mod_base = OTHER; note = 2'-fluorocytidine
  modified_base 10: mod_base = OTHER; note = 2'-fluoroadenosine
  modified_base 11: mod_base = OTHER; note = 2'-fluoroadenosine
  modified_base 12: mod_base = gm
  modified_base 13: mod_base = OTHER; note = 2'-O-methyladenosine
  modified_base 14: mod_base = cm
  modified_base 15: mod_base = OTHER; note = 2'-O-methyladenosine
  modified_base 16: mod_base = cm
  modified_base 17: mod_base = OTHER; note = 2'-O-methyladenosine
  modified_base 18: mod_base = gm
  modified_base 19: mod_base = OTHER; note = 2'-O-methylcytidine with a 3'-phosphorothioate linkage
  modified_base 20: mod_base = OTHER; note = 2'-O-methyladenosine with a 3'-phosphorothioate linkage
  modified_base 21: mod_base = OTHER; note = 2'-O-methyladenosine
acaatgtccaagacacagcaa

SEQ ID NO: 797 - RNA, 23 nt, synthetic construct
  source 1..23: mol_type = other RNA
  modified_base 1: mod_base = OTHER; note = 2'-O-methyluridine with a 3'-phosphorothioate linkage
  modified_base 2: mod_base = OTHER; note = 2'-fluorouridine with a 3'-phosphorothioate linkage
  modified_base 3: mod_base = gm
  modified_base 4: mod_base = cm
  modified_base 5: mod_base = um
  modified_base 6: mod_base = OTHER; note = 2'-fluoroguanosine
  modified_base 7: mod_base = um
  modified_base 8: mod_base = gm
  modified_base 9: mod_base = um
  modified_base 10: mod_base = cm
  modified_base 11: mod_base = um
  modified_base 12: mod_base = um
  modified_base 13: mod_base = gm
  modified_base 14: mod_base = OTHER; note = 2'-fluoroguanosine
  modified_base 15: mod_base = OTHER; note = 2'-O-methyladenosine
  modified_base 16: mod_base = OTHER; note = 2'-fluorocytidine
  modified_base 17: mod_base = OTHER; note = 2'-O-methyladenosine
  modified_base 18: mod_base = um
  modified_base 19: mod_base = um
  modified_base 20: mod_base = gm
  modified_base 21: mod_base = OTHER; note = 2'-O-methyluridine with a 3'-phosphorothioate linkage
  modified_base 22: mod_base = OTHER; note = 2'-O-methylcytidine with a 3'-phosphorothioate linkage
  modified_base 23: mod_base = OTHER; note = 2'-O-methyladenosine
ttgctgtgtcttggacattgtca

SEQ ID NO: 798 - RNA, 21 nt, synthetic construct
  source 1..21: mol_type = other RNA
  modified_base 1: mod_base = OTHER; note = 2'-O-methylguanosine with a 3'-phosphorothioate linkage
  modified_base 2: mod_base = OTHER; note = 2'-O-methyluridine with a 3'-phosphorothioate linkage
  modified_base 3: mod_base = gm
  modified_base 4: mod_base = OTHER; note = 2'-O-methyladenosine
  modified_base 5: mod_base = OTHER; note = 2'-O-methyladenosine
  modified_base 6: mod_base = OTHER; note = 2'-O-methyladenosine
  modified_base 7: mod_base = OTHER; note = 2'-fluoroguanosine
  modified_base 8: mod_base = gm
  modified_base 9: mod_base = OTHER; note = 2'-fluoroadenosine
  modified_base 10: mod_base = OTHER; note = 2'-fluoroadenosine
  modified_base 11: mod_base = OTHER; note = 2'-fluoroadenosine
  modified_base 12: mod_base = gm
  modified_base 13: mod_base = cm
  modified_base 14: mod_base = um
  modified_base 15: mod_base = OTHER; note = 2'-O-methyladenosine
  modified_base 16: mod_base = gm
  modified_base 17: mod_base = gm
  modified_base 18: mod_base = gm
  modified_base 19: mod_base = OTHER; note = 2'-O-methyladenosine with a 3'-phosphorothioate linkage
  modified_base 20: mod_base = OTHER; note = 2'-O-methylcytidine with a 3'-phosphorothioate linkage
  modified_base 21: mod_base = OTHER; note = 2'-O-methyladenosine
gtgaaaggaaagctagggaca

SEQ ID NO: 799 - RNA, 23 nt, synthetic construct
  source 1..23: mol_type = other RNA
  modified_base 1: mod_base = OTHER; note = 2'-O-methyluridine with a 3'-phosphorothioate linkage
  modified_base 2: mod_base = OTHER; note = 2'-fluoroguanosine with a 3'-phosphorothioate linkage
  modified_base 3: mod_base = um
  modified_base 4: mod_base = cm
  modified_base 5: mod_base = cm
  modified_base 6: mod_base = OTHER; note = 2'-fluorocytidine
  modified_base 7: mod_base = um
  modified_base 8: mod_base = OTHER; note = 2'-O-methyladenosine
  modified_base 9: mod_base = gm
  modified_base 10: mod_base = cm
  modified_base 11: mod_base = um
  modified_base 12: mod_base = um
  modified_base 13: mod_base = um
  modified_base 14: mod_base = OTHER; note = 2'-fluorocytidine
  modified_base 15: mod_base = cm
  modified_base 16: mod_base = OTHER; note = 2'-fluorouridine
  modified_base 17: mod_base = um
  modified_base 18: mod_base = um
  modified_base 19: mod_base = cm
  modified_base 20: mod_base = OTHER; note = 2'-O-methyladenosine
  modified_base 21: mod_base = OTHER; note = 2'-O-methylcytidine with a 3'-phosphorothioate linkage
  modified_base 22: mod_base = OTHER; note = 2'-O-methylcytidine with a 3'-phosphorothioate linkage
  modified_base 23: mod_base = um
tgtccctagctttcctttcacct

SEQ ID NO: 800 - RNA, 21 nt, synthetic construct
  source 1..21: mol_type = other RNA
  modified_base 1: mod_base = OTHER; note = 2'-O-methyladenosine with a 3'-phosphorothioate linkage
  modified_base 2: mod_base = OTHER; note = 2'-O-methylguanosine with a 3'-phosphorothioate linkage
  modified_base 3: mod_base = cm
  modified_base 4: mod_base = um
  modified_base 5: mod_base = cm
  modified_base 6: mod_base = um
  modified_base 7: mod_base = OTHER; note = 2'-fluorouridine
  modified_base 8: mod_base = um
  modified_base 9: mod_base = OTHER; note = 2'-fluorocytidine
  modified_base 10: mod_base = OTHER; note = 2'-fluoroadenosine
  modified_base 11: mod_base = OTHER; note = 2'-fluorocytidine
  modified_base 12: mod_base = um
  modified_base 13: mod_base = um
  modified_base 14: mod_base = cm
  modified_base 15: mod_base = gm
  modified_base 16: mod_base = gm
  modified_base 17: mod_base = OTHER; note = 2'-O-methyladenosine
  modified_base 18: mod_base = gm
  modified_base 19: mod_base = OTHER; note = 2'-O-methylguanosine with a 3'-phosphorothioate linkage
  modified_base 20: mod_base = OTHER; note = 2'-O-methyladenosine with a 3'-phosphorothioate linkage
  modified_base 21: mod_base = OTHER; note = 2'-O-methyladenosine
agctctttcacttcggaggaa

SEQ ID NO: 801 - RNA, 23 nt, synthetic construct
  source 1..23: mol_type = other RNA
  modified_base 1: mod_base = OTHER; note = 2'-O-methyluridine with a 3'-phosphorothioate linkage
  modified_base 2: mod_base = OTHER; note = 2'-fluorouridine with a 3'-phosphorothioate linkage
  modified_base 3: mod_base = cm
  modified_base 4: mod_base = cm
  modified_base 5: mod_base = um
  modified_base 6: mod_base = OTHER; note = 2'-fluorocytidine
  modified_base 7: mod_base = cm
  modified_base 8: mod_base = gm
  modified_base 9: mod_base = OTHER; note = 2'-O-methyladenosine
  modified_base 10: mod_base = OTHER; note = 2'-O-methyladenosine
  modified_base 11: mod_base = gm
  modified_base 12: mod_base = um
  modified_base 13: mod_base = gm
  modified_base 14: mod_base = OTHER; note = 2'-fluoroadenosine
  modified_base 15: mod_base = OTHER; note = 2'-O-methyladenosine
  modified_base 16: mod_base = OTHER; note = 2'-fluoroadenosine
  modified_base 17: mod_base = gm
  modified_base 18: mod_base = OTHER; note = 2'-O-methyladenosine
  modified_base 19: mod_base = gm
  modified_base 20: mod_base = cm
  modified_base 21: mod_base = OTHER; note = 2'-O-methyluridine with a 3'-phosphorothioate linkage
  modified_base 22: mod_base = OTHER; note = 2'-O-methyluridine with a 3'-phosphorothioate linkage
  modified_base 23: mod_base = cm
ttcctccgaagtgaaagagcttc

SEQ ID NO: 802 - RNA, 21 nt, synthetic construct
  source 1..21: mol_type = other RNA
  modified_base 1: mod_base = OTHER; note = 2'-O-methyluridine with a 3'-phosphorothioate linkage
  modified_base 2: mod_base = OTHER; note = 2'-O-methyluridine with a 3'-phosphorothioate linkage
  modified_base 3: mod_base = cm
  modified_base 4: mod_base = um
  modified_base 5: mod_base = um
  modified_base 6: mod_base = cm
  modified_base 7: mod_base = OTHER; note = 2'-fluorocytidine
  modified_base 8: mod_base = OTHER; note = 2'-O-methyladenosine
  modified_base 9: mod_base = OTHER; note = 2'-fluoroadenosine
  modified_base 10: mod_base = OTHER; note = 2'-fluoroadenosine
  modified_base 11: mod_base = OTHER; note = 2'-fluorouridine
  modified_base 12: mod_base = gm
  modified_base 13: mod_base = cm
  modified_base 14: mod_base = OTHER; note = 2'-O-methyladenosine
  modified_base 15: mod_base = gm
  modified_base 16: mod_base = OTHER; note = 2'-O-methyladenosine
  modified_base 17: mod_base = OTHER; note = 2'-O-methyladenosine
  modified_base 18: mod_base = gm
  modified_base 19: mod_base = OTHER; note = 2'-O-methyladenosine with a 3'-phosphorothioate linkage
  modified_base 20: mod_base = OTHER; note = 2'-O-methyluridine with a 3'-phosphorothioate linkage
  modified_base 21: mod_base = OTHER; note = 2'-O-methyladenosine
ttcttccaaatgcagaagata

SEQ ID NO: 803 - RNA, 23 nt, synthetic construct
  source 1..23: mol_type = other RNA
  modified_base 1: mod_base = OTHER; note = 2'-O-methyluridine with a 3'-phosphorothioate linkage
  modified_base 2: mod_base = OTHER; note = 2'-fluoroadenosine with a 3'-phosphorothioate linkage
  modified_base 3: mod_base = um
  modified_base 4: mod_base = cm
  modified_base 5: mod_base = um
  modified_base 6: mod_base = OTHER; note = 2'-fluorouridine
  modified_base 7: mod_base = cm
  modified_base 8: mod_base = um
  modified_base 9: mod_base = gm
  modified_base 10: mod_base = cm
  modified_base 11: mod_base = OTHER; note = 2'-O-methyladenosine
  modified_base 12: mod_base = um
  modified_base 13: mod_base = um
  modified_base 14: mod_base = OTHER; note = 2'-fluorouridine
  modified_base 15: mod_base = gm
  modified_base 16: mod_base = OTHER; note = 2'-fluoroguanosine
  modified_base 17: mod_base = OTHER; note = 2'-O-methyladenosine
  modified_base 18: mod_base = OTHER; note = 2'-O-methyladenosine
  modified_base 19: mod_base = gm
  modified_base 20: mod_base = OTHER; note = 2'-O-methyladenosine
  modified_base 21: mod_base = OTHER; note = 2'-O-methyladenosine with a 3'-phosphorothioate linkage
  modified_base 22: mod_base = OTHER; note = 2'-O-methyladenosine with a 3'-phosphorothioate linkage
  modified_base 23: mod_base = OTHER; note = 2'-O-methyladenosine
tatcttctgcatttggaagaaaa

SEQ ID NO: 804 - RNA, 21 nt, synthetic construct
  source 1..21: mol_type = other RNA
  modified_base 1: mod_base = OTHER; note = 2'-O-methylguanosine with a 3'-phosphorothioate linkage
  modified_base 2: mod_base = OTHER; note = 2'-O-methylguanosine with a 3'-phosphorothioate linkage
  modified_base 3: mod_base = OTHER; note = 2'-O-methyladenosine
  modified_base 4: mod_base = gm
  modified_base 5: mod_base = gm
  modified_base 6: mod_base = OTHER; note = 2'-O-methyladenosine
  modified_base 7: mod_base = OTHER; note = 2'-fluorouridine
  modified_base 8: mod_base = um
  modified_base 9: mod_base = OTHER; note = 2'-fluoroguanosine
  modified_base 10: mod_base = OTHER; note = 2'-fluorocytidine
  modified_base 11: mod_base = OTHER; note = 2'-fluorouridine
  modified_base 12: mod_base = cm
  modified_base 13: mod_base = OTHER; note = 2'-O-methyladenosine
  modified_base 14: mod_base = OTHER; note = 2'-O-methyladenosine
  modified_base 15: mod_base = cm
  modified_base 16: mod_base = OTHER; note = 2'-O-methyladenosine
  modified_base 17: mod_base = OTHER; note = 2'-O-methyladenosine
  modified_base 18: mod_base = cm
  modified_base 19: mod_base = OTHER; note = 2'-O-methylcytidine with a 3'-phosphorothioate linkage
  modified_base 20: mod_base = OTHER; note = 2'-O-methyladenosine with a 3'-phosphorothioate linkage
  modified_base 21: mod_base = OTHER; note = 2'-O-methyladenosine
ggaggattgctcaacaaccaa

SEQ ID NO: 805 - RNA, 23 nt, synthetic construct
  source 1..23: mol_type = other RNA
  modified_base 1: mod_base = OTHER; note = 2'-O-methyluridine with a 3'-phosphorothioate linkage
  modified_base 2: mod_base = OTHER; note = 2'-fluorouridine with a 3'-phosphorothioate linkage
  modified_base 3: mod_base = gm
  modified_base 4: mod_base = gm
  modified_base 5: mod_base = um
  modified_base 6: mod_base = OTHER; note = 2'-fluorouridine
  modified_base 7: mod_base = gm
  modified_base 8: mod_base = um
  modified_base 9: mod_base = um
  modified_base 10: mod_base = gm
  modified_base 11: mod_base = OTHER; note = 2'-O-methyladenosine
  modified_base 12: mod_base = gm
  modified_base 13: mod_base = cm
  modified_base 14: mod_base = OTHER; note = 2'-fluoroadenosine
  modified_base 15: mod_base = OTHER; note = 2'-O-methyladenosine
  modified_base 16: mod_base = OTHER; note = 2'-fluorouridine
  modified_base 17: mod_base = cm
  modified_base 18: mod_base = cm
  modified_base 19: mod_base = um
  modified_base 20: mod_base = cm
  modified_base 21: mod_base = OTHER; note = 2'-O-methylcytidine with a 3'-phosphorothioate linkage
  modified_base 22: mod_base = OTHER; note = 2'-O-methylguanosine with a 3'-phosphorothioate linkage
  modified_base 23: mod_base = OTHER; note = 2'-O-methyladenosine
ttggttgttgagcaatcctccga

SEQ ID NO: 806 - RNA, 21 nt, synthetic construct
  source 1..21: mol_type = other RNA
  modified_base 1: mod_base = OTHER; note = 2'-O-methyluridine with a 3'-phosphorothioate linkage
  modified_base 2: mod_base = OTHER; note = 2'-O-methylguanosine with a 3'-phosphorothioate linkage
  modified_base 3: mod_base = cm
  modified_base 4: mod_base = cm
  modified_base 5: mod_base = OTHER; note = 2'-O-methyladenosine
  modified_base 6: mod_base = OTHER; note = 2'-O-methyladenosine
  modified_base 7: mod_base = OTHER; note = 2'-fluoroguanosine
  modified_base 8: mod_base = OTHER; note = 2'-O-methyladenosine
  modified_base 9: mod_base = OTHER; note = 2'-fluoroadenosine
  modified_base 10: mod_base = OTHER; note = 2'-fluoroguanosine
  modified_base 11: mod_base = OTHER; note = 2'-fluoroguanosine
  modified_base 12: mod_base = gm
  modified_base 13: mod_base = OTHER; note = 2'-O-methyladenosine
  modified_base 14: mod_base = OTHER; note = 2'-O-methyladenosine
  modified_base 15: mod_base = gm
  modified_base 16: mod_base = gm
  modified_base 17: mod_base = OTHER; note = 2'-O-methyladenosine
  modified_base 18: mod_base = gm
  modified_base 19: mod_base = OTHER; note = 2'-O-methyluridine with a 3'-phosphorothioate linkage
  modified_base 20: mod_base = OTHER; note = 2'-O-methyladenosine with a 3'-phosphorothioate linkage
  modified_base 21: mod_base = OTHER; note = 2'-O-methyladenosine
tgccaagaagggaaggagtaa

SEQ ID NO: 807 - RNA, 23 nt, synthetic construct
  source 1..23: mol_type = other RNA
  modified_base 1: mod_base = OTHER; note = 2'-O-methyluridine with a 3'-phosphorothioate linkage
  modified_base 2: mod_base = OTHER; note = 2'-fluorouridine with a 3'-phosphorothioate linkage
  modified_base 3: mod_base = OTHER; note = 2'-O-methyladenosine
  modified_base 4: mod_base = cm
  modified_base 5: mod_base = um
  modified_base 6: mod_base = OTHER; note = 2'-fluorocytidine
  modified_base 7: mod_base = cm
  modified_base 8: mod_base = um
  modified_base 9: mod_base = um
  modified_base 10: mod_base = cm
  modified_base 11: mod_base = cm
  modified_base 12: mod_base = cm
  modified_base 13: mod_base = um
  modified_base 14: mod_base = OTHER; note = 2'-fluorouridine
  modified_base 15: mod_base = cm
  modified_base 16: mod_base = OTHER; note = 2'-fluorouridine
  modified_base 17: mod_base = um
  modified_base 18: mod_base = gm
  modified_base 19: mod_base = gm
  modified_base 20: mod_base = cm
  modified_base 21: mod_base = OTHER; note = 2'-O-methyladenosine with a 3'-phosphorothioate linkage
  modified_base 22: mod_base = OTHER; note = 2'-O-methylguanosine with a 3'-phosphorothioate linkage
  modified_base 23: mod_base = gm
ttactccttcccttcttggcagg

SEQ ID NO: 808 - RNA, 21 nt, synthetic construct
  source 1..21: mol_type = other RNA
  modified_base 1: mod_base = OTHER; note = 2'-O-methylguanosine with a 3'-phosphorothioate linkage
  modified_base 2: mod_base = OTHER; note = 2'-O-methyladenosine with a 3'-phosphorothioate linkage
  modified_base 3: mod_base = OTHER; note = 2'-O-methyladenosine
  modified_base 4: mod_base = OTHER; note = 2'-O-methyladenosine
  modified_base 5: mod_base = gm
  modified_base 6: mod_base = um
  modified_base 7: mod_base = OTHER; note = 2'-fluorouridine
  modified_base 8: mod_base = cm
  modified_base 9: mod_base = OTHER; note = 2'-fluoroadenosine
  modified_base 10: mod_base = OTHER; note = Abasic site
  modified_base 11: mod_base = OTHER; note = 2'-fluorocytidine
  modified_base 12: mod_base = um
  modified_base 13: mod_base = gm
  modified_base 14: mod_base = cm
  modified_base 15: mod_base = um
  modified_base 16: mod_base = um
  modified_base 17: mod_base = cm
  modified_base 18: mod_base = gm
  modified_base 19: mod_base = OTHER; note = 2'-O-methyluridine with a 3'-phosphorothioate linkage
  modified_base 20: mod_base = OTHER; note = 2'-O-methyladenosine with a 3'-phosphorothioate linkage
  modified_base 21: mod_base = OTHER; note = 2'-O-methyladenosine
gaaagttcanctgcttcgtaa

SEQ ID NO: 809 - RNA, 21 nt, synthetic construct
  source 1..21: mol_type = other RNA
  modified_base 1: mod_base = OTHER; note = 2'-O-methylguanosine with a 3'-phosphorothioate linkage
  modified_base 2: mod_base = OTHER; note = 2'-O-methyladenosine with a 3'-phosphorothioate linkage
  modified_base 3: mod_base = OTHER; note = 2'-O-methyladenosine
  modified_base 4: mod_base = OTHER; note = 2'-O-methyladenosine
  modified_base 5: mod_base = gm
  modified_base 6: mod_base = um
  modified_base 7: mod_base = um
  modified_base 8: mod_base = cm
  modified_base 9: mod_base = OTHER; note = 2'-fluoroadenosine
  modified_base 10: mod_base = OTHER; note = 2'-fluoroadenosine
  modified_base 11: mod_base = OTHER; note = 2'-fluorocytidine
  modified_base 12: mod_base = um
  modified_base 13: mod_base = gm
  modified_base 14: mod_base = cm
  modified_base 15: mod_base = um
  modified_base 16: mod_base = um
  modified_base 17: mod_base = cm
  modified_base 18: mod_base = gm
  modified_base 19: mod_base = OTHER; note = 2'-O-methyluridine with a 3'-phosphorothioate linkage
  modified_base 20: mod_base = OTHER; note = 2'-O-methyladenosine with a 3'-phosphorothioate linkage
  modified_base 21: mod_base = OTHER; note = 2'-O-methyladenosine
gaaagttcaactgcttcgtaa

SEQ ID NO: 810 - RNA, 21 nt, synthetic construct
  source 1..21: mol_type = other RNA
  modified_base 1: mod_base = OTHER; note = 2'-O-methylguanosine with a 3'-phosphorothioate linkage
  modified_base 2: mod_base = OTHER; note = 2'-O-methyluridine with a 3'-phosphorothioate linkage
  modified_base 3: mod_base = um
  modified_base 4: mod_base = gm
  modified_base 5: mod_base = OTHER; note = 2'-O-methyladenosine
  modified_base 6: mod_base = cm
  modified_base 7: mod_base = OTHER; note = 2'-fluorouridine
  modified_base 8: mod_base = um
  modified_base 9: mod_base = OTHER; note = 2'-fluoroguanosine
  modified_base 10: mod_base = OTHER; note = Abasic site
  modified_base 11: mod_base = OTHER; note = 2'-fluoroguanosine
  modified_base 12: mod_base = um
  modified_base 13: mod_base = OTHER; note = 2'-O-methyladenosine
  modified_base 14: mod_base = OTHER; note = 2'-O-methyladenosine
  modified_base 15: mod_base = OTHER; note = 2'-O-methyladenosine
  modified_base 16: mod_base = um
  modified_base 17: mod_base = OTHER; note = 2'-O-methyladenosine
  modified_base 18: mod_base = um
  modified_base 19: mod_base = OTHER; note = 2'-O-methyladenosine with a 3'-phosphorothioate linkage
  modified_base 20: mod_base = OTHER; note = 2'-O-methyluridine with a 3'-phosphorothioate linkage
  modified_base 21: mod_base = OTHER; note = 2'-O-methyladenosine
gttgacttgngtaaatatata

SEQ ID NO: 811 - RNA, 21 nt, synthetic construct
  source 1..21: mol_type = other RNA
  modified_base 1: mod_base = OTHER; note = 2'-O-methylguanosine with a 3'-phosphorothioate linkage
  modified_base 2: mod_base = OTHER; note = 2'-O-methyluridine with a 3'-phosphorothioate linkage
  modified_base 3: mod_base = um
  modified_base 4: mod_base = gm
  modified_base 5: mod_base = OTHER; note = 2'-O-methyladenosine
  modified_base 6: mod_base = cm
  modified_base 7: mod_base = um
  modified_base 8: mod_base = um
  modified_base 9: mod_base = OTHER; note = 2'-fluoroguanosine
  modified_base 10: mod_base = OTHER; note = 2'-fluoroadenosine
  modified_base 11: mod_base = OTHER; note = 2'-fluoroguanosine
  modified_base 12: mod_base = um
  modified_base 13: mod_base = OTHER; note = 2'-O-methyladenosine
  modified_base 14: mod_base = OTHER; note = 2'-O-methyladenosine
  modified_base 15: mod_base = OTHER; note = 2'-O-methyladenosine
  modified_base 16: mod_base = um
  modified_base 17: mod_base = OTHER; note = 2'-O-methyladenosine
  modified_base 18: mod_base = um
  modified_base 19: mod_base = OTHER; note = 2'-O-methyladenosine with a 3'-phosphorothioate linkage
  modified_base 20: mod_base = OTHER; note = 2'-O-methyluridine with a 3'-phosphorothioate linkage
  modified_base 21: mod_base = OTHER; note = 2'-O-methyladenosine
gttgacttgagtaaatatata

SEQ ID NO: 812 - RNA, 21 nt, synthetic construct
  source 1..21: mol_type = other RNA
  modified_base 1: mod_base = OTHER; note = 2'-O-methyladenosine with a 3'-phosphorothioate linkage
  modified_base 2: mod_base = OTHER; note = 2'-O-methylguanosine with a 3'-phosphorothioate linkage
  modified_base 3: mod_base = OTHER; note = 2'-O-methyladenosine
  modified_base 4: mod_base = OTHER; note = 2'-O-methyladenosine
  modified_base 5: mod_base = OTHER; note = 2'-O-methyladenosine
  modified_base 6: mod_base = gm
  modified_base 7: mod_base = OTHER; note = 2'-fluorouridine
  modified_base 8: mod_base = um
  modified_base 9: mod_base = OTHER; note = 2'-fluorocytidine
  modified_base 10: mod_base = OTHER; note = 2'-fluoroadenosine
  modified_base 11: mod_base = OTHER; note = 2'-fluoroadenosine
  modified_base 12: mod_base = cm
  modified_base 13: mod_base = um
  modified_base 14: mod_base = gm
  modified_base 15: mod_base = cm
  modified_base 16: mod_base = um
  modified_base 17: mod_base = um
  modified_base 18: mod_base = cm
  modified_base 19: mod_base = OTHER; note = 2'-O-methylguanosine with a 3'-phosphorothioate linkage
  modified_base 20: mod_base = OTHER; note = 2'-O-methyluridine with a 3'-phosphorothioate linkage
  modified_base 21: mod_base = OTHER; note = 2'-O-methyladenosine
agaaagttcaactgcttcgta

SEQ ID NO: 813 - RNA, 23 nt, synthetic construct
  source 1..23: mol_type = other RNA
  modified_base 1: mod_base = OTHER; note = 2'-O-methyluridine with a 3'-phosphorothioate linkage
  modified_base 2: mod_base = OTHER; note = 2'-fluoroadenosine with a 3'-phosphorothioate linkage
  modified_base 3: mod_base = cm
  modified_base 4: mod_base = gm
  modified_base 5: mod_base = OTHER; note = 2'-O-methyladenosine
  modified_base 6: mod_base = OTHER; note = 2'-fluoroadenosine
  modified_base 7: mod_base = gm
  modified_base 8: mod_base = cm
  modified_base 9: mod_base = OTHER; note = 2'-O-methyladenosine
  modified_base 10: mod_base = gm
  modified_base 11: mod_base = um
  modified_base 12: mod_base = um
  modified_base 13: mod_base = gm
  modified_base 14: mod_base = OTHER; note = 2'-fluoroadenosine
  modified_base 15: mod_base = OTHER; note = 2'-O-methyladenosine
  modified_base 16: mod_base = OTHER; note = 2'-fluorocytidine
  modified_base 17: mod_base = um
  modified_base 18: mod_base = um
  modified_base 19: mod_base = um
  modified_base 20: mod_base = cm
  modified_base 21: mod_base = OTHER; note = 2'-O-methyluridine with a 3'-phosphorothioate linkage
  modified_base 22: mod_base = OTHER; note = 2'-O-methylguanosine with a 3'-phosphorothioate linkage
  modified_base 23: mod_base = um
tacgaagcagttgaactttctgt

SEQ ID NO: 814 - RNA, 21 nt, synthetic construct
  source 1..21: mol_type = other RNA
  modified_base 1: mod_base = OTHER; note = 2'-O-methylcytidine with a 3'-phosphorothioate linkage
  modified_base 2: mod_base = OTHER; note = 2'-O-methyluridine with a 3'-phosphorothioate linkage
  modified_base 3: mod_base = gm
  modified_base 4: mod_base = um
  modified_base 5: mod_base = OTHER; note = 2'-O-methyladenosine
  modified_base 6: mod_base = um
  modified_base 7: mod_base = gm
  modified_base 8: mod_base = um
  modified_base 9: mod_base = OTHER; note = 2'-fluoroguanosine
  modified_base 10: mod_base = OTHER; note = 2'-fluoroadenosine
  modified_base 11: mod_base = OTHER; note = 2'-fluoroadenosine
  modified_base 12: mod_base = cm
  modified_base 13: mod_base = OTHER; note = 2'-O-methyladenosine
  modified_base 14: mod_base = cm
  modified_base 15: mod_base = um
  modified_base 16: mod_base = gm
  modified_base 17: mod_base = um
  modified_base 18: mod_base = gm
  modified_base 19: mod_base = OTHER; note = 2'-O-methyladenosine with a 3'-phosphorothioate linkage
  modified_base 20: mod_base = OTHER; note = 2'-O-methylcytidine with a 3'-phosphorothioate linkage
  modified_base 21: mod_base = OTHER; note = 2'-O-methyladenosine
ctgtatgtgaacactgtgaca

SEQ ID NO: 815 - RNA, 23 nt, synthetic construct
  source 1..23: mol_type = other RNA
  modified_base 1: mod_base = OTHER; note = 2'-O-methyluridine with a 3'-phosphorothioate linkage
  modified_base 2: mod_base = OTHER; note = 2'-fluoroguanosine with a 3'-phosphorothioate linkage
  modified_base 3: mod_base = OTHER; note = 2'-fluorouridine
  modified_base 4: mod_base = cm
  modified_base 5: mod_base = OTHER; note = 2'-O-methyladenosine
  modified_base 6: mod_base = cm
  modified_base 7: mod_base = OTHER; note = 2'-fluoroadenosine
  modified_base 8: mod_base = gm
  modified_base 9: mod_base = um
  modified_base 10: mod_base = gm
  modified_base 11: mod_base = um
  modified_base 12: mod_base = um
  modified_base 13: mod_base = cm
  modified_base 14: mod_base = OTHER; note = 2'-fluoroadenosine
  modified_base 15: mod_base = cm
  modified_base 16: mod_base = OTHER; note = 2'-fluoroadenosine
  modified_base 17: mod_base = um
  modified_base 18: mod_base = OTHER; note = 2'-O-methyladenosine
  modified_base 19: mod_base = cm
  modified_base 20: mod_base = OTHER; note = 2'-O-methyladenosine
  modified_base 21: mod_base = OTHER; note = 2'-O-methylguanosine with a 3'-phosphorothioate linkage
  modified_base 22: mod_base = OTHER; note = 2'-O-methyluridine with a 3'-phosphorothioate linkage
  modified_base 23: mod_base = OTHER; note = 2'-O-methyladenosine
tgtcacagtgttcacatacagta

SEQ ID NO: 816 - RNA, 21 nt, synthetic construct
  source 1..21: mol_type = other RNA
  modified_base 1: mod_base = OTHER; note = 2'-O-methyluridine with a 3'-phosphorothioate linkage
  modified_base 2: mod_base = OTHER; note = 2'-O-methylguanosine with a 3'-phosphorothioate linkage
  modified_base 3: mod_base = OTHER; note = 2'-O-methyladenosine
  modified_base 4: mod_base = cm
  modified_base 5: mod_base = um
  modified_base 6: mod_base = um
  modified_base 7: mod_base = gm
  modified_base 8: mod_base = OTHER; note = 2'-O-methyladenosine
  modified_base 9: mod_base = OTHER; note = 2'-fluoroguanosine
  modified_base 10: mod_base = OTHER; note = 2'-fluorouridine
  modified_base 11: mod_base = OTHER; note = 2'-fluoroadenosine
  modified_base 12: mod_base = OTHER; note = 2'-O-methyladenosine
  modified_base 13: mod_base = OTHER; note = 2'-O-methyladenosine
  modified_base 14: mod_base = um
  modified_base 15: mod_base = OTHER; note = 2'-O-methyladenosine
  modified_base 16: mod_base = um
  modified_base 17: mod_base = OTHER; note = 2'-O-methyladenosine
  modified_base 18: mod_base = um
  modified_base 19: mod_base = OTHER; note = 2'-O-methylcytidine with a 3'-phosphorothioate linkage
  modified_base 20: mod_base = OTHER; note = 2'-O-methyladenosine with a 3'-phosphorothioate linkage
  modified_base 21: mod_base = OTHER; note = 2'-O-methyladenosine
tgacttgagtaaatatatcaa

SEQ ID NO: 817 - RNA, 23 nt, synthetic construct
  source 1..23: mol_type = other RNA
  modified_base 1: mod_base = OTHER; note = 2'-O-methyluridine with a 3'-phosphorothioate linkage
  modified_base 2: mod_base = OTHER; note = 2'-fluorouridine with a 3'-phosphorothioate linkage
  modified_base 3: mod_base = OTHER; note = 2'-fluoroguanosine
  modified_base 4: mod_base = OTHER; note = 2'-O-methyladenosine
  modified_base 5: mod_base = um
  modified_base 6: mod_base = OTHER; note = 2'-O-methyladenosine
  modified_base 7: mod_base = OTHER; note = 2'-fluorouridine
  modified_base 8: mod_base = OTHER; note = 2'-O-methyladenosine
  modified_base 9: mod_base = um
  modified_base 10: mod_base = um
  modified_base 11: mod_base = um
  modified_base 12: mod_base = OTHER; note = 2'-O-methyladenosine
  modified_base 13: mod_base = cm
  modified_base 14: mod_base = OTHER; note = 2'-fluorouridine
  modified_base 15: mod_base = cm
  modified_base 16: mod_base = OTHER; note = 2'-fluoroadenosine
  modified_base 17: mod_base = OTHER; note = 2'-O-methyladenosine
  modified_base 18: mod_base = gm
  modified_base 19: mod_base = um
  modified_base 20: mod_base = cm
  modified_base 21: mod_base = OTHER; note = 2'-O-methyladenosine with a 3'-phosphorothioate linkage
  modified_base 22: mod_base = OTHER; note = 2'-O-methyladenosine with a 3'-phosphorothioate linkage
  modified_base 23: mod_base = cm
ttgatatatttactcaagtcaac

SEQ ID NO: 818 - RNA, 21 nt, synthetic construct
  source 1..21: mol_type = other RNA
  modified_base 1: mod_base = OTHER; note = 2'-O-methylguanosine with a 3'-phosphorothioate linkage
  modified_base 2: mod_base = OTHER; note = 2'-O-methyluridine with a 3'-phosphorothioate linkage
  modified_base 3: mod_base = OTHER; note = 2'-O-methyladenosine
  modified_base 4: mod_base = um
  modified_base 5: mod_base = gm
  modified_base 6: mod_base = um
  modified_base 7: mod_base = gm
  modified_base 8: mod_base = OTHER; note = 2'-O-methyladenosine
  modified_base 9: mod_base = OTHER; note = 2'-fluoroadenosine
  modified_base 10: mod_base = OTHER; note = 2'-fluorocytidine
  modified_base 11: mod_base = OTHER; note = 2'-fluoroadenosine
  modified_base 12: mod_base = cm
  modified_base 13: mod_base = um
  modified_base 14: mod_base = gm
  modified_base 15: mod_base = um
  modified_base 16: mod_base = gm
  modified_base 17: mod_base = OTHER; note = 2'-O-methyladenosine
  modified_base 18: mod_base = cm
  modified_base 19: mod_base = OTHER; note = 2'-O-methylcytidine with a 3'-phosphorothioate linkage
  modified_base 20: mod_base = OTHER; note = 2'-O-methylcytidine with a 3'-phosphorothioate linkage
  modified_base 21: mod_base = OTHER; note = 2'-O-methyladenosine
gtatgtgaacactgtgaccca

SEQ ID NO: 819 - RNA, 23 nt, synthetic construct
  source 1..23: mol_type = other RNA
  modified_base 1: mod_base = OTHER; note = 2'-O-methyluridine with a 3'-phosphorothioate linkage
  modified_base 2: mod_base = OTHER; note = 2'-fluoroguanosine with a 3'-phosphorothioate linkage
  modified_base 3: mod_base = OTHER; note = 2'-fluoroguanosine
  modified_base 4: mod_base = gm
  modified_base 5: mod_base = um
  modified_base 6: mod_base = cm
  modified_base 7: mod_base = OTHER; note = 2'-fluoroadenosine
  modified_base 8: mod_base = cm
  modified_base 9: mod_base = OTHER; note = 2'-O-methyladenosine
  modified_base 10: mod_base = gm
  modified_base 11: mod_base = um
  modified_base 12: mod_base = gm
  modified_base 13: mod_base = um
  modified_base 14: mod_base = OTHER; note = 2'-fluorouridine
  modified_base 15: mod_base = cm
  modified_base 16: mod_base = OTHER; note = 2'-fluoroadenosine
  modified_base 17: mod_base = cm
  modified_base 18: mod_base = OTHER; note = 2'-O-methyladenosine
  modified_base 19: mod_base = um
  modified_base 20: mod_base = OTHER; note = 2'-O-methyladenosine
  modified_base 21: mod_base = OTHER; note = 2'-O-methylcytidine with a 3'-phosphorothioate linkage
  modified_base 22: mod_base = OTHER; note = 2'-O-methyladenosine with a 3'-phosphorothioate linkage
  modified_base 23: mod_base = gm
tgggtcacagtgttcacatacag

SEQ ID NO: 820 - RNA, 21 nt, synthetic construct
  source 1..21: mol_type = other RNA
gccgaatgtcgcagaacctta

SEQ ID NO: 821 - RNA, 23 nt, synthetic construct
  source 1..23: mol_type = other RNA
taaggttctgcgacattcggctt

SEQ ID NO: 822 - RNA, 21 nt, synthetic construct
  source 1..21: mol_type = other RNA
ccgaatgtcgcagaaccttaa

SEQ ID NO: 823 - RNA, 23 nt, synthetic construct
  source 1..23: mol_type = other RNA
ttaaggttctgcgacattcggct

SEQ ID NO: 824 - RNA, 21 nt, synthetic construct
  source 1..21: mol_type = other RNA
atgtcgcagaaccttagataa

SEQ ID NO: 825 - RNA, 23 nt, synthetic construct
  source 1..23: mol_type = other RNA
ttatctaaggttctgcgacattc

SEQ ID NO: 826 - RNA, 21 nt, synthetic construct
  source 1..21: mol_type = other RNA
  modified_base 1: mod_base = OTHER; note = 2'-O-methylguanosine with a 3'-phosphorothioate linkage
  modified_base 2: mod_base = OTHER; note = 2'-O-methylcytidine with a 3'-phosphorothioate linkage
  modified_base 3: mod_base = cm
  modified_base 4: mod_base = gm
  modified_base 5: mod_base = OTHER; note = 2'-O-methyladenosine
  modified_base 6: mod_base = OTHER; note = 2'-O-methyladenosine
  modified_base 7: mod_base = um
  modified_base 8: mod_base = gm
  modified_base 9: mod_base = OTHER; note = 2'-fluorouridine
  modified_base 10: mod_base = OTHER; note = 2'-fluorocytidine
  modified_base 11: mod_base = OTHER; note = 2'-fluoroguanosine
  modified_base 12: mod_base = cm
  modified_base 13: mod_base = OTHER; note = 2'-O-methyladenosine
  modified_base 14: mod_base = gm
  modified_base 15: mod_base = OTHER; note = 2'-O-methyladenosine
  modified_base 16: mod_base = OTHER; note = 2'-O-methyladenosine
  modified_base 17: mod_base = cm
  modified_base 18: mod_base = cm
  modified_base 19: mod_base = OTHER; note = 2'-O-methyluridine with a 3'-phosphorothioate linkage
  modified_base 20: mod_base = OTHER; note = 2'-O-methyluridine with a 3'-phosphorothioate linkage
  modified_base 21: mod_base = OTHER; note = 2'-O-methyladenosine
gccgaatgtcgcagaacctta

SEQ ID NO: 827 - RNA, 23 nt, synthetic construct
  source 1..23: mol_type = other RNA
  modified_base 1: mod_base = OTHER; note = 2'-O-methyluridine with a 3'-phosphorothioate linkage
  modified_base 2: mod_base = OTHER; note = 2'-fluoroadenosine with a 3'-phosphorothioate linkage
  modified_base 3: mod_base = OTHER; note = 2'-fluoroadenosine
  modified_base 4: mod_base = gm
  modified_base 5: mod_base = gm
  modified_base 6: mod_base = um
  modified_base 7: mod_base = OTHER; note = 2'-fluorouridine
  modified_base 8: mod_base = cm
  modified_base 9: mod_base = um
  modified_base 10: mod_base = gm
  modified_base 11: mod_base = cm
  modified_base 12: mod_base = gm
  modified_base 13: mod_base = OTHER; note = 2'-O-methyladenosine
  modified_base 14: mod_base = OTHER; note = 2'-fluorocytidine
  modified_base 15: mod_base = OTHER; note = 2'-O-methyladenosine
  modified_base 16: mod_base = OTHER; note = 2'-fluorouridine
  modified_base 17: mod_base = um
  modified_base 18: mod_base = cm
  modified_base 19: mod_base = gm
  modified_base 20: mod_base = gm
  modified_base 21: mod_base = OTHER; note = 2'-O-methylcytidine with a 3'-phosphorothioate linkage
  modified_base 22: mod_base = OTHER; note = 2'-O-methyluridine with a 3'-phosphorothioate linkage
  modified_base 23: mod_base = um
taaggttctgcgacattcggctt

SEQ ID NO: 828 - RNA, 21 nt, synthetic construct
  source 1..21: mol_type = other RNA
  modified_base 1: mod_base = OTHER; note = 2'-O-methylcytidine with a 3'-phosphorothioate linkage
  modified_base 2: mod_base = OTHER; note = 2'-O-methylcytidine with a 3'-phosphorothioate linkage
  modified_base 3: mod_base = gm
  modified_base 4: mod_base = OTHER; note = 2'-O-methyladenosine
  modified_base 5: mod_base = OTHER; note = 2'-O-methyladenosine
  modified_base 6: mod_base = um
  modified_base 7: mod_base = gm
  modified_base 8: mod_base = um
  modified_base 9: mod_base = OTHER; note = 2'-fluorocytidine
  modified_base 10: mod_base = OTHER; note = 2'-fluoroguanosine
  modified_base 11: mod_base = OTHER; note = 2'-fluorocytidine
  modified_base 12: mod_base = OTHER; note = 2'-O-methyladenosine
  modified_base 13: mod_base = gm
  modified_base 14: mod_base = OTHER; note = 2'-O-methyladenosine
  modified_base 15: mod_base = OTHER; note = 2'-O-methyladenosine
  modified_base 16: mod_base = cm
  modified_base 17: mod_base = cm
  modified_base 18: mod_base = um
  modified_base 19: mod_base = OTHER; note = 2'-O-methyluridine with a 3'-phosphorothioate linkage
  modified_base 20: mod_base = OTHER; note = 2'-O-methyladenosine with a 3'-phosphorothioate linkage
  modified_base 21: mod_base = OTHER; note = 2'-O-methyladenosine
ccgaatgtcgcagaaccttaa

SEQ ID NO: 829 - RNA, 23 nt, synthetic construct
  source 1..23: mol_type = other RNA
  modified_base 1: mod_base = OTHER; note = 2'-O-methyluridine with a 3'-phosphorothioate linkage
  modified_base 2: mod_base = OTHER; note = 2'-fluorouridine with a 3'-phosphorothioate linkage
  modified_base 3: mod_base = OTHER; note = 2'-fluoroadenosine
  modified_base 4: mod_base = OTHER; note = 2'-O-methyladenosine
  modified_base 5: mod_base = gm
  modified_base 6: mod_base = gm
  modified_base 7: mod_base = OTHER; note = 2'-fluorouridine
  modified_base 8: mod_base = um
  modified_base 9: mod_base = cm
  modified_base 10: mod_base = um
  modified_base 11: mod_base = gm
  modified_base 12: mod_base = cm
  modified_base 13: mod_base = gm
  modified_base 14: mod_base = OTHER; note = 2'-fluoroadenosine
  modified_base 15: mod_base = cm
  modified_base 16: mod_base = OTHER; note = 2'-fluoroadenosine
  modified_base 17: mod_base = um
  modified_base 18: mod_base = um
  modified_base 19: mod_base = cm
  modified_base 20: mod_base = gm
  modified_base 21: mod_base = OTHER; note = 2'-O-methylguanosine with a 3'-phosphorothioate linkage
  modified_base 22: mod_base = OTHER; note = 2'-O-methylcytidine with a 3'-phosphorothioate linkage
  modified_base 23: mod_base = um
ttaaggttctgcgacattcggct

SEQ ID NO: 830 - RNA, 21 nt, synthetic construct
  source 1..21: mol_type = other RNA
  modified_base 1: mod_base = OTHER; note = 2'-O-methyladenosine with a 3'-phosphorothioate linkage
  modified_base 2: mod_base = OTHER; note = 2'-O-methyluridine with a 3'-phosphorothioate linkage
  modified_base 3: mod_base = gm
  modified_base 4: mod_base = um
  modified_base 5: mod_base = cm
  modified_base 6: mod_base = gm
  modified_base 7: mod_base = cm
  modified_base 8: mod_base = OTHER; note = 2'-O-methyladenosine
  modified_base 9: mod_base = OTHER; note = 2'-fluoroguanosine
  modified_base 10: mod_base = OTHER; note = 2'-fluoroadenosine
  modified_base 11: mod_base = OTHER; note = 2'-fluoroadenosine
  modified_base 12: mod_base = cm
  modified_base 13: mod_base = cm
  modified_base 14: mod_base = um
  modified_base 15: mod_base = um
  modified_base 16: mod_base = OTHER; note = 2'-O-methyladenosine
  modified_base 17: mod_base = gm
  modified_base 18: mod_base = OTHER; note = 2'-O-methyladenosine
  modified_base 19: mod_base = OTHER; note = 2'-O-methyluridine with a 3'-phosphorothioate linkage
  modified_base 20: mod_base = OTHER; note = 2'-O-methyladenosine with a 3'-phosphorothioate linkage
  modified_base 21: mod_base = OTHER; note = 2'-O-methyladenosine
atgtcgcagaaccttagataa

SEQ ID NO: 831 - RNA, 23 nt, synthetic construct
  source 1..23: mol_type = other RNA
  modified_base 1: mod_base = OTHER; note = 2'-O-methyluridine with a 3'-phosphorothioate linkage
  modified_base 2: mod_base = OTHER; note = 2'-fluorouridine with a 3'-phosphorothioate linkage
  modified_base 3: mod_base = OTHER; note = 2'-fluoroadenosine
  modified_base 4: mod_base = um
  modified_base 5: mod_base = cm
  modified_base 6: mod_base = um
  modified_base 7: mod_base = OTHER; note = 2'-fluoroadenosine
  modified_base 8: mod_base = OTHER; note = 2'-O-methyladenosine
  modified_base 9: mod_base = gm
  modified_base 10: mod_base = gm
  modified_base 11: mod_base = um
  modified_base 12: mod_base = um
  modified_base 13: mod_base = cm
  modified_base 14: mod_base = OTHER; note = 2'-fluorouridine
  modified_base 15: mod_base = gm
  modified_base 16: mod_base = OTHER; note = 2'-fluorocytidine
  modified_base 17: mod_base = gm
  modified_base 18: mod_base = OTHER; note = 2'-O-methyladenosine
  modified_base 19: mod_base = cm
  modified_base 20: mod_base = OTHER; note = 2'-O-methyladenosine
  modified_base 21: mod_base = OTHER; note = 2'-O-methyluridine with a 3'-phosphorothioate linkage
  modified_base 22: mod_base = OTHER; note = 2'-O-methyluridine with a 3'-phosphorothioate linkage
  modified_base 23: mod_base = cm
ttatctaaggttctgcgacattc
